(19) United States
(12) Patent Application Publication
(10) Pub. No.: US 2021/0139883 A1
(43) Pub. Date: May 13, 2021

(54) NEW ATTENUATED STRAINS OF APICOMPLEXA AND THEIR USE AS ANTIGEN VECTORS FOR THE PREVENTION OF INFECTIOUS DISEASES

(71) Applicants: UNIVERSITE DE TOURS, TOURS CEDEX 1 (FR); INSTITUT NATIONAL DE LA RECHERCHE AGRONOMIQUE, PARIS CEDEX 07 (FR)

(72) Inventors: Anne-France BOUSSEMART-PROUVOST, MOUVAUX (FR); Edouard SECHE, OLIVET (FR); Thi Kim Chi NGUYEN, DIJON (FR)

(21) Appl. No.: 16/628,216

(22) PCT Filed: Jul. 3, 2018
(86) PCT No.: PCT/FR2018/051660

§ 371 Date: Jan. 2, 2020

(30) Foreign Application Priority Data
Jul. 3, 2017 (FR) 17/56276

(51) Int. Cl. C12N 15/10; C12N 15/66; A61K 39/002; C12N 1/36

(52) U.S. Cl. CPC C12N 15/102; C12N 15/66; A61K 2039/522; C12N 1/36; A61K 39/002

(57) ABSTRACT

Disclosed is a mutant strain of Sarcocystidae in which the two genes mic1 and mic3 are deleted containing two specific recombination sites of an enzyme allowing a specific recombination, in particular Cre-recombinase, the specific recombination sites being at the respective locus of each of the deleted genes, the specific recombination site of the enzyme allowing specific recombination, in particular of the Cre-recombinase, at the locus of the deleted mic1 gene being different from that of the deleted mic3 gene.

[0001] This invention concerns new attenuated strains of apicomplexes and their use as antigen carriers for the prevention of infectious diseases.

[0002] Apicomplexes are mainly obligatory intracellular parasites that have a life cycle that can involve several hosts. The phylum of these parasites is subdivided into several families. Toxoplasma gondii (T. gondii) belongs to the Sarcocystidae family. The cat, the definitive host, excretes the parasite into the environment as oocysts. Intermediate (i.e. all homeotherms) and definitive hosts can become infected by ingesting oocysts from food. The parasite then transforms into tachyzoites that spread throughout the body and, under pressure from the immune system, encyst with a preferential tropism for the central nervous system, retina or muscles. The ingestion of encysted tissues is the second cause of contamination of definitive and intermediate hosts.

[0003] Recently, an attenuated live strain of Toxoplasma gondii, the parasite responsible for toxoplasmosis, was developed by invalidation of two genes encoding TgMIC1 and TgMIC3 proteins (Cérède et al., 2005, J. Exp. Med., 201(3): 453-63). This strain, called Toxo tgmic1-3 KO, generates a strong and specific immune response against Toxoplasma gondii and prevents the effects of subsequent infection in mice (Ismael et al., 2006, J. Infect. Say. 194(8): 1176-83) and in sheep (Mévelec et al., 2010, Vet. Res., 41(4):49). Neospora caninum (N. caninum) is an intracellular parasite responsible for neosporosis. It also belongs to the Sarcocystidae family. The life cycle of Neospora caninum is very similar to that of T. gondii with two distinct phases: a sexual phase in the final host (i.e. canids and dogs in particular) which leads to the production of oocysts eliminated in the faeces and an asexual phase in an intermediate host (i.e. sheep, goats, cattle, equidae, etc.) which leads to the production of tachyzoites then cysts containing bradyzoites.

[0004] More recently, an attenuated live strain of Neospora caninum, the Neo ncmic1-3 KO strain, has been obtained and has been invalidated for the ncmic1 and ncmic3 genes by homologous recombination. It has been shown that this mutant strain has infectious and immunogenic properties that provide mammals with vaccine protection against the harmful effects of neosporosis.

[0005] Parasites of the Sarcocystidae family such as Toxoplasma gondii and Neospora caninum can be used to express heterologous proteins from other parasites such as Plasmodium spp, Cryptosporidium parvum or Leishmania spp.

[0006] For example, the wild strain RH of Toxoplasma gondii was used as a vector for the CSP antigen (Protein Circum Sporozoite) of Plasmodium knowlesi (Di Cristina et al., 1999, Infect Immun., 67(4): 1677-82). After random integration of the sequence of interest, the recombinant strain was inoculated into Rhesus monkeys and induced in animals a humoral immune response specific for the CSP protein. In the thermosensitive strain is-4 HXGPRT−/− of Toxoplasma gondii was used as a vector for the CSP antigen of Plasmodium yoelii (Charest et al., 2000, J. Immunol., 165(4): 2084-92). After random integration of the sequence of interest, the recombinant parasites were inoculated into the mouse inducing a humoral immune response specific for CSP antigen but insufficient to induce protection against infection with Plasmodium yoelii.

[0007] A strain of Toxoplasma gondii was also used to express the genes gp40, gp15 and the precursor gp40/gp15 of Cryptosporidium parvum, the parasite responsible for cryptosporidiosis (O'Connor et al., Infect. Immun. 2003 71(10):6027-35; O'Connor et al. 2007, Mol Biochem Parasitol, 152(2):148-58). The genes gp40/gp15, gp40 and gp15 were cloned, placed under the control of a T. gondii promoter and randomly integrated into the parasite genome. The authors showed that recombinant parasites expressed proteins of interest and that the glycosylation of the GP40 protein expressed by T. gondii was similar to the glycosylation of the native protein. However, the authors demonstrated that cleavage of the pre-protein GP40/GP15 was ineffective in tachyzoites although cleavage enzymes are present in the parasite T. gondii. Another team also investigated the use of Toxoplasma gondii as an antigen vector of Cryptosporidium parvum and in particular the immunodominant surface protein P23 (Shirafuji et al., 2005, J. Parasitol., 91(2):476-9). The molecular weight and antigenic properties of recombinant P23 are similar to those of native protein and mice immunized with lysed tachyzoites expressing P23 produce neutralizing antibodies against C. parvum.

[0008] Finally, T. gondii was used as an expression vector for the Kmp11 Leishmania antigen. The recombinant strain obtained allows significant protection of the animals during a challenge with L. major (Ramirez et al., 2001, Vaccine, 20:455-61).

[0009] Neospora caninum has also been used as a vector of heterologous antigens and a recombinant strain of N. caninum stably expressing the SAG1 antigen of T. gondii has been constructed (Zhang et al., 2010, Vaccine, 60(1):105-7). The expression level, molecular weight and antigenic properties of the SAG1 protein expressed in N. caninum are similar to those of the native SAG1 protein and immune mice produce a Th1-type immune response specific for SAG1 of T. gondii and are protected against a lethal challenge with T. gondii.

[0010] The Cre/LoxP system has been used in the activation or inactivation strategies of mammalian cell genes (Fukushige and Sauer, 1992, PNAS, 89(17): 7905-9) or transgenic mice (Tsien et al., 1996, Cell, 87(7):1317-26.).

[0011] Cre Recombinase is an enzyme derived from bacteriophage P1 (Sternberg and Hamilton, 1981, J. Mol. Biol. 150(4): 487-507) of the integrases family which recognize very specific sites and allow recombination between two identical sites. The restriction site for Cre Recombinase is the LoxP site, a 34 base pair nucleotide sequence (SEQ ID NO: 12) that includes two small sequences of 13 repeated and inverted base pairs and a spacer region (in bold) of 8 base pairs. Several mutants of the LoxP site are described and 3 sites have been identified as incompatible with each other (Livet et al., 2007, Nature, 450(7166): 56-62). These are the LoxP (SEQ ID NO: 12), LoxN (SEQ ID NO: 5) and Lox2272 (SEQ ID NO: 68) sites.

[0012] The properties of Cre recombinase are multiple and can be used for (FIG. 1):
[0013] Delete a DNA sequence present between two identical Lox sites and with the same orientation,
[0014] Invert a DNA sequence present between two identical Lox sites and with the opposite orientation,
[0015] Integrate at a LoxP or LoxN site a DNA sequence containing the LoxP or LoxN site.

[0016] In Toxoplasma gondii, the Cre/Lox system was first used in 1999 (Brecht et al., 1999, Gene, 234(2):239-47). Following the random insertion of a reporter gene framed by LoxP sites oriented in an identical direction, the action of Cre Recombinase allowed the deletion of the reporter gene and the formation of a LoxP scar. Recombinase Cre was then used to integrate a new heterologous transgene into this LoxP scar. More recently; the Cre/LoxP system has been used to produce a deleted strain of Toxoplasma gondii for the morn1 gene (Heaslip et al., 2010, PloS Pathog, 6(2): e1000754). Finally, KO (knockout) strains of T. gondii have recently been created using a dimerizable form of inducible Recombinase Cre only after the addition of a ligand: rapamycin (Andenmatten et al., 2013, Nat. Methods, 10(2): 125-7; Rugarabamu et al., 2015, Mol. Microbiol, 97(2): 244-62).

[0017] This invention concerns new attenuated strains of Sarcocystidae (Toxoplasma gondii and Neospora caninum).

[0018] This invention also concerns the use of new attenuated strains of Sarcocystidae (Toxoplasma gondii and Neospora caninum) as an antigen vector for the prevention of infectious diseases.

[0019] This invention concerns a mutant strain of Sarcocystidae in which at least one of the genes mic1 or mic3 is deleted, containing a specific recombination site of an enzyme allowing specific recombination, at the locus of said at least one deleted gene, and in the case where both mic1 and mic3 genes are deleted, the specific recombination site of the enzyme allowing specific recombination at the locus of the deleted mic1 gene is potentially different from that at the locus of the deleted mic3 gene.

[0020] Enzyme allowing specific recombination” means enzyme catalysing DNA recombination in a defined sense between specific sites determined by sequences specific to each enzyme. In particular, they allow the excision, insertion, inversion or translocation of a nucleotide sequence flanked by specific sites.

[0021] Examples of enzymes that allow specific recombination include Cre recombinase, FLP recombinase, Tre recombinase, RecA proteins and Hin recombinase (bacteria).

[0022] The mic1 and mic3 genes are used to code the MIC1 and MIC3 proteins. They are proteins of micronemes, the secretory organelles of Apicomplexes that play a central role in the recognition and adherence to host cells.

[0023] In a particular mode of production, the enzyme allowing a specific recombination is cre-recombinase. Thus, in this case, the mutant strain of Sarcocystidae in which at least one of the mic1 or mic3 genes is deleted contains a specific recombination site of the cre-recombinase at the locus of said at least one deleted gene.

[0024] and in the case where both mic1 and mic3 genes are deleted, the specific recombination site of the cre-recombinase at the locus of the deleted mic1 gene is different from that at the locus of the deleted mic3 gene.

[0025] “Gene deletion” refers to the deletion of the entire coding sequence (introns and exons), the deletion of the promoter region and the deletion of the untranslated transcribed regions 5′ and 3′, known as 5′ and 3′ UTR, the term “gene” referring to the promoter region (also known as promoter), the coding sequence and the regions 5′ and 3′ UTR.

[0026] Cre recombinase is a topoisomerase derived from the bacteriophage P1, this enzyme is functional in parasites. The possible use of several Lox sites that do not interact with each other makes it possible to consider several deletions.

[0027] Examples of specific recombination sites of Cre-recombinase (Lox sites) include, but are not limited to, LoxP, LoxN, Lox2272, Lox71, Lox66, Lox511, Lox5171 and LoxM2.

[0028] The present invention concerns a mutant strain of Sarcocystidae in which the two genes mic1 and mic3 are deleted containing two specific recombination sites of an enzyme allowing a specific recombination, in particular Cre-recombinase, said specific recombination sites being at the respective locus of each of said deleted genes, the specific recombination site of the enzyme allowing specific recombination, in particular of the Cre-recombinase, at the locus of the deleted mic1 gene being different from that of the deleted mic3 gene.

[0029] According to a particular method of implementation, the present invention concerns a mutant strain of Sarcocystidae in which the said enzyme allowing specific recombination is Cre-recombinase and in which, in the case where the two genes mic1 and mic3 are deleted, the specific recombination site of the enzyme allowing specific recombination at the locus of the deleted mic1 gene is different from that at the locus of the deleted mic3 gene.

[0030] According to a particular method of production, the said mutant strain of Sarcocystidae is a strain of the genus Toxoplasma spp.

[0031] This genus includes between the species Toxoplasma gondii.

[0032] According to a particular method of production, the said mutant strain of Sarcocystidae is a strain of the species Toxoplasma gondii.

[0033] According to a particular method of production, the said mutant strain of Sarcocystidae is a strain of the genus Toxoplasma spp. in particular a strain of the species Toxoplasma gondii.

[0034] According to another particular method of production, the said mutant strain of Sarcocystidae is a strain of the genus Neospora spp.

[0035] This genus includes, among others, the following species: Neospora caninum, Neospora hughesi.

[0036] According to a particular method of production, the said mutant strain of Sarcocystidae is a strain of the species Neospora caninum.

[0037] According to a particular method of production, the said mutant strain of Sarcocystidae is a strain of the genus Neospora spp., in particular a strain of the species Neospora caninum.

[0038] In a particular mode of realization, the present invention concerns a mutant strain of Sarcocystidae in which both mic 1 and mic 3 genes are deleted, and which contains a specific recombination site of an enzyme allowing specific recombination, in particular Cre-recombinase, at the locus of the deleted mic 1 gene, and a specific recombination site of the enzyme allowing specific recombination, in particular Cre-recombinase, at the locus of the deleted mic3 gene, the locus-specific recombination site of the deleted mic1 gene being different from the locus-specific recombination site of the deleted mic3 gene.

[0039] In the case where the enzyme allowing specific recombination is Cre-recombinase, said mutant Sarcocystidae strain in which both mic 1 and mic 3 genes are deleted, contains a specific recombination site of Cre-recombinase at the locus of the deleted mic 1 gene, and a specific recombination site of Cre-recombinase at the locus of the deleted mic3 gene, the specific recombination site of the Cre-recombinase at the locus of the deleted mic1 gene being different from that at the locus of the deleted mic3 gene.

[0040] Thus, according to a particular method of implementation, the present invention concerns a mutant strain of Sarcocystidae in which the two genes mic 1 and mic 3 are deleted, and containing two sites of specific recombination of an enzyme allowing specific recombination, in particular Cre-recombinase, each of the two sites being respectively at the locus of each of the said deleted genes, the specific recombination site of the enzyme allowing a specific recombination, in particular of the Cre-recombinase, at the locus of the deleted mic1 gene being different from that of the deleted mic3 gene.

[0041] In a particular mode of realization, the present invention concerns a mutant strain of Sarcocystidae in which both mic 1 and mic 3 genes are deleted, and which contains a specific recombination site of an enzyme allowing specific recombination, in particular Cre-recombinase, at the locus of the deleted mic 1 gene, and a specific recombination site of the enzyme allowing specific recombination, in particular Cre-recombinase, at the locus of the deleted mic3 gene,

[0042] the locus-specific recombination site of the deleted mic1 gene being different from the locus-specific recombination site of the deleted mic3 gene,

[0043] and said strain not containing heterologous DNA, other than those corresponding to the specific recombination sites of the enzyme allowing specific recombination, in particular Cre-recombinase, at the respective locus of each of the said deleted genes.

[0044] By “not containing heterologous DNA other than heterologous DNA corresponding to the specific recombination sites of the enzyme allowing specific recombination”, it is meant that the strain may contain, as the only heterologous DNA, one or more sequences corresponding to a specific recombination site of an enzyme allowing specific recombination.

[0045] In the case where the enzyme allowing a specific recombination is Cre-recombinase, said mutant Sarcocystidae strain in which both mic 1 and mic 3 genes are deleted, contains a specific recombination site of the deleted mic 1 gene at the locus of the deleted mic 1 gene, and a specific recombination site of the deleted mic3 gene at the locus of the deleted mic3 gene,

[0046] the specific recombination site of the Cre-recombinase at the locus of the deleted mic1 gene being different from that at the locus of the deleted mic3 gene,

[0047] said strain not containing heterologous DNA, other than those corresponding to the specific recombination sites of the Cre-recombinase, at the respective locus of each of said deleted genes.

[0048] Containing heterologous DNA, other than heterologous DNA corresponding to recombination sites of cre-recombinase” means that said strain contains heterologous DNA which does not correspond to a sequence of a specific recombination site of cre-recombinase and which does not include a sequence corresponding to a specific recombination site of an enzyme allowing specific recombination.

[0049] According to a particular method of realization, the present invention concerns a mutant strain of Sarcocystidae in which the two genes mic1 and mic3 are deleted, and containing two sites of specific recombination of an enzyme allowing a specific recombination in particular Cre-recombinase, each of the two sites being respectively at the location of each of the said deleted genes, the specific recombination site of the enzyme allowing a specific recombination, in particular Cre-recombinase, at the locus of the deleted mic1 gene being different from that at the locus of the deleted mic3 gene, and not containing heterologous DNA, other than those corresponding to the specific recombination sites of an enzyme allowing a specific recombination, in particular Cre-recombinase, at the respective locus of each of the said deleted genes.

[0050] In a particular mode of realization, the present invention concerns a mutant strain of Sarcocystidae in which both mic 1 and mic 3 genes are deleted, and containing a specific recombination site of the deleted mic 1 gene at the locus of the deleted mic 1 gene, and a specific recombination site of the deleted Cre-recombinase at the locus of the deleted mic3 gene,

[0051] the specific recombination site of the Cre-recombinase at the locus of the deleted mic1 gene being different from that at the locus of the deleted mic3 gene.

[0052] said strain not containing heterologous DNA, other than those corresponding to the Cre-recombinase specific recombination sites, at the respective locus of each of said deleted genes,

[0053] and wherein each of the specific recombination sites of the Cre-recombinase at the respective locus of the deleted mic1 and mic3 genes are selected from the following sites: LoxN of SEQ ID NO: 5, LoxP of SEQ ID NO: 12 and Lox2272 of SEQ ID NO: 68, the recombination site of the Cre-recombinase at the locus of the deleted mic1 gene being different to that at the locus of the deleted mic3 gene.

[0054] In a particular mode of realization, the present invention concerns a mutant strain according to the invention, in which the two genes mic1 and mic3 are deleted, containing two sites of specific recombination of an enzyme allowing specific recombination, at the respective locus of each of the said deleted genes, the site of specific recombination of the enzyme allowing specific recombination, at the locus of the deleted mic1 gene being different from that at the locus of the deleted mic3 gene, and not containing heterologous DNA, other than heterologous DNA corresponding to the specific recombination sites of the enzyme allowing specific recombination, in particular Cre-recombinase, at the respective locus of each of the said deleted genes,

[0055] in particular said enzyme allowing specific recombination being Cre-recombinase, and the specific recombination sites of Cre-recombinase at the respective locus of each of said deleted genes being chosen from: LoxN of SEQ ID NO: 5, LoxP of SEQ ID NO: 12 and Lox2272 of SEQ ID NO: 68.

[0056] According to a particular method of implementation, the present invention concerns a mutant strain of Sarcocystidae in which the two genes mic1 and mic3 are deleted, and which does not contain heterologous DNA, other than those corresponding to the specific recombination sites of an enzyme allowing specific recombination, in particular Cre-recombinase, at the respective locus of each of the said deleted genes

[0057] and containing two enzyme-specific recombination sites allowing specific recombination, said enzyme being Cre-recombinase, each of the two sites being respectively at the locus of each of said deleted genes, said specific recombination sites being cre-recombinase specific recombination sites selected from: LoxN of SEQ ID NO: 5, LoxP of SEQ ID NO: 12 and Lox2272 of SEQ ID NO: 68, the recombination site of the Cre-recombinase at the locus of the deleted mic1 gene being different from that at the locus of the deleted mic3 gene.

[0058] In a particular mode of realization, the present invention concerns a mutant strain of Sarcocystidae in which both mic 1 and mic 3 genes are deleted, and containing a specific recombination site of an enzyme allowing specific recombination, in particular Cre-recombinase, at the locus of the deleted mic 1 gene, and a specific recombination site of the enzyme allowing specific recombination, in particular Cre-recombinase, at the locus of the deleted mic3 gene,

[0059] the locus-specific recombination site of the deleted mic1 gene being different from the locus-specific recombination site of the deleted mic3 gene,

[0060] and said strain containing DNA heterologous at the locus of the deleted mic1 gene or at the locus of the deleted mic3 gene, different from the heterologous DNA corresponding to the specific recombination sites of the enzyme allowing specific recombination, in particular Cre-recombinase, at the respective locus of each of the deleted mic1 and mic3 genes, so that:
[0061] when said heterologous DNA is inserted at the locus of the deleted mic1 gene, it is flanked:
   [0062] a first enzyme-specific recombination site allowing specific recombination, in particular Cre-recombinase, corresponding to the enzyme-specific recombination site allowing specific recombination, in particular Cre-recombinase, at the locus of the deleted mic1 gene, and
   [0063] of a second specific recombination site identical to said first specific recombination site located at the locus of the deleted mic1 gene, this second site being provided in addition to the sites already present in the strain, due to the additional specific recombination when adding heterologous DNA,
[0064] when said heterologous DNA is inserted at the locus of the deleted mic3 gene, it is flanked:
   [0065] a first enzyme-specific recombination site allowing specific recombination, in particular Cre-recombinase, corresponding to the enzyme-specific recombination site allowing specific recombination, in particular Cre-recombinase, at the locus of the deleted mic3 gene, and
   [0066] a second specific recombination site identical to said first specific recombination site located at the locus of the deleted mic3 gene,

[0067] said strain comprising the means necessary for the transcription of said heterologous DNA.

[0068] This mode of realization targets the production of heterologous RNA from said heterologous DNA in a mutant strain as described above.

[0069] By “means necessary for the transcription of said heterologous DNA”, we mean a promoter, a transcription initiation site, a TATA box, a transcription terminator.

[0070] The RNA thus transcribed may be a messenger RNA, an interfering RNA, a long non-coding RNA, a stem-loop RNA (in English “Hairpin RNA”),

[0071] According to a particular method of realization, the present invention concerns a mutant strain of Sarcocystidae in which the two genes mic1 and mic3 are deleted, and containing two sites of specific recombination of an enzyme allowing specific recombination, in particular Cre-recombinase, each of the two sites being respectively at the location of each of the said deleted genes, the site of specific recombination of the enzyme allowing specific recombination, in particular Cre-recombinase, at the locus of the deleted mic1 gene being different from that at the locus of the deleted mic3 gene, and containing DNA heterologous to the locus of the deleted mic1 gene or to the locus of the deleted mic3 gene, different from the heterologous DNA corresponding to the specific recombination sites of the enzyme allowing a specific recombination in particular Cre-recombinase, at the respective locus of each of the said deleted genes,

[0072] said heterologous DNA being flanked:
[0073] a first recombination site specific to the enzyme allowing specific recombination, in particular Cre-recombinase, corresponding to the recombination site specific to the enzyme allowing specific recombination, in particular Cre-recombinase, at the locus of the deleted mic1 gene or that of the deleted mic3 gene, and
[0074] a second specific recombination site identical to said first specific recombination site

[0075] and the means necessary for the transcription of the said heterologous DNA.

[0076] In a particular mode of realization, the present invention concerns a strain according to the invention, containing a heterologous DNA at the locus of the deleted mic1 gene or at the locus of the deleted mic3 gene, different from the heterologous DNA corresponding to the specific recombination sites of the enzyme allowing a specific recombination at the respective locus of each of the said deleted genes, said heterologous DNA being flanked:
[0077] a first enzyme-specific recombination site allowing specific recombination, corresponding to the enzyme-specific recombination site allowing specific recombination, at the locus of the deleted mic1 gene or the locus of the deleted mic3 gene and,
[0078] a second specific recombination site identical to said first specific recombination site, corresponding to the enzyme-specific recombination site allowing specific recombination, at the locus of the deleted mic1 gene or the locus of the deleted mic3 gene and,

[0079] and the means necessary for its transcription, in particular said enzyme allowing specific recombination being Cre-recombinase and the specific recombination sites of Cre-recombinase being chosen from: LoxN of SEQ ID NO: 5, LoxP of SEQ ID NO: 12 and Lox2272 of SEQ ID NO: 68.

[0080] In a particular mode of realization, the present invention concerns a mutant strain of Sarcocystidae in which both mic 1 and mic 3 genes are deleted, and containing a specific recombination site of an enzyme allowing specific recombination, in particular Cre-recombinase, at the locus of the deleted mic 1 gene, and a specific recombination site of the enzyme allowing specific recombination, in particular Cre-recombinase, at the locus of the deleted mic3 gene,

[0081] the locus-specific recombination site of the deleted mic1 gene being different from the locus-specific recombination site of the deleted mic3 gene,

[0082] said strain containing DNA heterologous to the locus of the deleted mic1 gene or to the locus of the deleted mic3 gene, other than those corresponding to the specific recombination sites of the enzyme allowing specific recombination, in particular Cre-recombinase, at the respective locus of each of the deleted mic1 and mic3 genes, so that:
[0083] when said heterologous DNA is inserted at the locus of the deleted mic1 gene, it is flanked:
   [0084] a first enzyme-specific recombination site allowing specific recombination, in particular Cre-recombinase, corresponding to the enzyme-specific recombination site allowing specific recombination, in particular Cre-recombinase, at the locus of the deleted mic1 gene, and
   [0085] a second specific recombination site identical to said first specific recombination site located at the locus of the deleted mic1 gene,
[0086] when said heterologous DNA is inserted at the locus of the deleted mic3 gene, it is flanked:
   [0087] a first enzyme-specific recombination site allowing specific recombination, in particular Cre-recombinase, corresponding to the enzyme-specific recombination site allowing specific recombination, in particular Cre-recombinase, at the locus of the deleted mic3 gene, and
   [0088] a second specific recombination site identical to said first specific recombination site located at the locus of the deleted mic3 gene,

[0089] said heterologous DNA encoding at least one protein, said mutant strain also includes the means necessary for the expression of said heterologous DNA.

[0090] This mode of realization targets the protein expression of said heterologous DNA in a mutant as described above.

[0091] In a particular mode of realization, the present invention concerns a strain according to the invention containing a heterologous DNA at the locus of the deleted mic1 gene or at the locus of the deleted mic3 gene, different from the heterologous DNA corresponding to the specific recombination sites of the enzyme allowing a recombination specific to the respective locus of each of the said deleted mic1 and mic3 genes, the said heterologous DNA coding for a protein and being flanked:
[0092] a first enzyme-specific recombination site allowing specific recombination corresponding to the enzyme-specific recombination site allowing specific recombination at the locus of the deleted mic1 gene or at the locus of the deleted mic3 gene, and
[0093] a second specific recombination site identical to said first specific recombination site, corresponding to the enzyme-specific recombination site allowing specific recombination, at the locus of the deleted mic1 gene or the locus of the deleted mic3 gene and,

[0094] and the means necessary for the protein expression of the said heterologous DNA, in particular said enzyme allowing specific recombination being Cre-recombinase and, the specific recombination sites of Cre-recombinase being chosen from: LoxN of SEQ ID NO: 5, LoxP of SEQ ID NO: 12 and Lox2272 of SEQ ID NO: 68.

[0095] According to a particular method of implementation, the present invention concerns a mutant strain of Sarcocystidae in which the two genes mic1 and mic3 are deleted, containing two sites of specific recombination of an enzyme allowing specific recombination, in particular Cre-recombinase, each of the two sites being respectively at the locus of each of the said deleted genes, the specific recombination site of the enzyme allowing a specific recombination, in particular Cre-recombinase, at the locus of the deleted mic1 gene being different from that of the deleted mic3 gene,

[0096] and containing a heterologous DNA at the locus of the deleted mic1 gene or at the locus of the deleted mic3 gene, different from the heterologous DNA corresponding to the specific recombination sites of the enzyme allowing a specific recombination, in particular Cre-recombinase, at the respective locus of each of the said deleted genes, said heterologous DNA encoding at least one protein and being flanked:
[0097] a first recombination site specific for the enzyme allowing specific recombination, in particular Cre-recombinase, corresponding to the recombination site specific for the enzyme allowing specific recombination, in particular Cre-recombinase at the locus of the deleted mic1 gene or at the locus of the deleted mic3 gene, and
[0098] a second specific recombination site identical to said first specific recombination site

[0099] and the means necessary for the expression of the said heterologous DNA.

[0100] In a particular mode of realization, the present invention concerns a mutant strain of Sarcocystidae in which both mic 1 and mic 3 genes are deleted, and containing a specific recombination site of the deleted mic 1 gene at the locus of the deleted mic 1 gene, and a specific recombination site of the deleted Cre-recombinase at the locus of the deleted mic3 gene,

[0101] the specific recombination site of the Cre-recombinase at the locus of the deleted mic1 gene (called site A) being different from that at the locus of the deleted mic3 gene (called site B), and said strain containing DNA heterologous to the locus of the deleted mic1 gene or the locus of the deleted mic3 gene, different from those corresponding to the specific recombination sites of the Cre-recombinase, to the respective locus of each of the deleted mic1 and mic3 genes, so that:
[0102] when said heterologous DNA is inserted at the locus of the deleted mic1 gene, it is flanked:
   [0103] a first Cre-recombinase-specific recombination site, corresponding to the Cre-recombinase-specific recombination site at the locus of the deleted mic1 gene (site A), and
   [0104] a second specific recombination site (site C), identical to the first specific recombination site located at the locus of the deleted mic1 gene (site A),

[0105] and the means necessary for the expression of the said heterologous DNA,
[0106] when said heterologous DNA is inserted at the locus of the deleted mic3 gene, it is flanked:
   [0107] a first enzyme-specific recombination site allowing specific recombination, in particular Cre-recombinase, corresponding to the enzyme-specific recombination site allowing specific recombination, in particular Cre-recombinase, at the locus of the deleted mic3 gene (site B), and
   [0108] a second specific recombination site (site C), identical to the first specific recombination site located at the mic3 gene (site B) deleted,

[0109] and the means necessary for the expression of the said heterologous DNA, said three specific recombination sites A, B and C being selected from the following sites: LoxN of SEQ ID NO: 5, LoxP of SEQ ID NO: 12 and Lox2272 of SEQ ID NO: 68, such that
[0110] said site A and said site B are different, and
[0111] said site C is identical to said site A or B,

[0112] it being understood that said strain comprises the elements necessary for the transcription of said heterologous DNA, or the means necessary for the expression of said heterologous DNA when said heterologous DNA encodes at least one protein.

[0113] According to a particular method of implementation, the present invention concerns a mutant strain of Sarcocystidae containing DNA heterologous at the locus of the deleted mic1 gene or at the locus of the deleted mic3 gene, different from the heterologous DNA corresponding to the specific recombination sites of an enzyme allowing specific recombination, in which said enzyme is Cre-recombinase, at the respective locus of each of the said deleted mic1 and mic3 genes,

[0114] and containing three specific recombination sites which are respectively:
[0115] site A corresponding to the specific recombination site of Cre-recombinase at the locus of the deleted mic1 gene
[0116] site B corresponding to the specific recombination site of Cre-recombinase at the locus of the deleted mic3 gene, and
[0117] the site C corresponding to said second specific recombination site which flanks said second heterologous DNA identical to said first specific recombination site, said first Cre-recombinase specific recombination site corresponding to said Cre-recombinase specific recombination site at the locus of the deleted mic1 gene (site A) or said Cre-recombinase specific recombination site at the locus of the deleted mic3 gene (site B)

[0118] said three specific recombination sites A, B and C being selected from the following sites: LoxN of SEQ ID NO: 5, LoxP of SEQ ID NO: 12 and Lox2272 of SEQ ID NO: 68, such that
[0119] said site A and said site B are different, and
[0120] said site C is identical to said site A or said site B.

[0121] In a particular mode of realization, the present invention concerns a mutant strain of Sarcocystidae in which both mic 1 and mic 3 genes are deleted, and containing a specific recombination site of the deleted mic 1 gene at the locus of the deleted mic 1 gene, and a specific recombination site of the deleted Cre-recombinase at the locus of the deleted mic3 gene,

[0122] such that the specific recombination site of the Cre-recombinase at the locus of the deleted mic1 gene (called site A) corresponds to a LoxN site SEQ ID NO: 5 and that at the locus of the deleted mic3 gene (called site B) corresponds to a LoxP site SEQ ID NO: 12,

[0123] and said strain containing DNA heterologous at the locus of the deleted mic1 gene or the locus of the deleted mic3 gene, different from the heterologous DNA corresponding to the specific recombination sites of the Cre-recombinase, at the respective locus of each of the deleted mic1 and mic3 genes, so that:
[0124] when said heterologous DNA is inserted at the locus of the deleted mic1 gene, it is flanked:
   [0125] a first Cre-recombinase specific recombination site, corresponding to the Cre-recombinase specific recombination site, at the locus of the deleted mic1 gene (site A) corresponding to a LoxN site SEQ ID NO: 5, and
   [0126] a second specific recombination site (site C) corresponding to a LoxN site SEQ ID NO: 5, identical to the first specific recombination site located at the locus of the deleted mic1 gene (site A),
[0127] when said heterologous DNA is inserted at the locus of the deleted mic3 gene, it is flanked:
   [0128] a first Cre-recombinase-specific recombination site, corresponding to a Cre-recombinase-specific recombination site, at the locus of the deleted mic3 gene (site B) corresponding to a LoxP site SEQ ID NO: 12, and
[0129] a second specific recombination site (site C) corresponding to a LoxP site SEQ ID NO: 12, identical to the first specific recombination site located at the locus of the deleted mic3 gene (site B),

[0130] it being understood that said strain comprises the elements necessary for the transcription of said heterologous DNA, or the means necessary for the expression of said heterologous DNA when said heterologous DNA encodes at least one protein.

[0131] In a particular mode of realization, the present invention concerns a mutant strain of Sarcocystidae in which both mic 1 and mic 3 genes are deleted, and containing a specific recombination site of the deleted mic 1 gene at the locus of the deleted mic 1 gene, and a specific recombination site of the deleted Cre-recombinase at the locus of the deleted mic3 gene,

[0132] such that the specific recombination site of the Cre-recombinase at the locus of the deleted mic1 gene (called site A) corresponds to a LoxP site SEQ ID NO: 12 and that at the locus of the deleted mic3 gene (called site B) corresponds to a LoxN site SEQ ID NO: 5, and said strain containing DNA heterologous at the locus of the deleted mic1 gene or the locus of the deleted mic3 gene, different from the heterologous DNA corresponding to the specific recombination sites of the Cre-recombinase, at the respective locus of each of the deleted mic1 and mic3 genes, so that:
[0133] when said heterologous DNA is inserted at the locus of the deleted mic1 gene, it is flanked:
   [0134] a first Cre-recombinase specific recombination site, corresponding to the Cre-recombinase specific recombination site, at the locus of the deleted mic1 gene (site A) corresponding to a LoxP site SEQ ID NO: 12, and
   [0135] a second specific recombination site (site C) corresponding to a LoxP site SEQ ID NO: 12, identical to the first specific recombination site located at the locus of the deleted mic1 gene (site A),
[0136] when said heterologous DNA is inserted at the locus of the deleted mic3 gene, it is flanked:
   [0137] a first Cre-recombinase-specific recombination site, corresponding to a Cre-recombinase-specific recombination site, at the locus of the deleted mic3 gene (site B) corresponding to a LoxN site SEQ ID NO: 5, and
   [0138] a second specific recombination site (site C) corresponding to a LoxN site SEQ ID NO: 5, identical to the first specific recombination site located at the locus of the deleted mic3 gene (site B),

[0139] it being understood that said strain comprises the elements necessary for the transcription of said heterologous DNA, or the means necessary for the expression of said heterologous DNA when said heterologous DNA encodes at least one protein.

[0140] According to a particular method of implementation, the present invention concerns a mutant strain of Sarcocystidae containing DNA heterologous at the locus of the deleted mic1 gene or at the locus of the deleted mic3 gene, different from the heterologous DNA corresponding to the specific recombination sites of an enzyme allowing specific recombination, in which said enzyme is Cre-recombinase, at the respective locus of each of the said deleted mic1 and mic3 genes,

[0141] and containing three specific recombination sites which are respectively:
[0142] site A corresponding to the specific recombination site of Cre-recombinase at the locus of the deleted mic1 gene
[0143] site B corresponding to the specific recombination site of Cre-recombinase at the locus of the deleted mic3 gene, and
[0144] the site C corresponding to said second specific recombination site which flanks said second heterologous DNA identical to said first specific recombination site, said first Cre-recombinase specific recombination site corresponding to said Cre-recombinase specific recombination site at the locus of the deleted mic1 gene (site A) or said Cre-recombinase specific recombination site at the locus of the deleted mic3 gene (site B)

[0145] said three specific recombination sites A, B and C being selected from the following sites: LoxN of SEQ ID NO: 5, LoxP of SEQ ID NO: 12 and Lox2272 of SEQ ID NO: 68, such as
[0146] said site A is the LoxN site of SEQ ID NO: 5
[0147] said site B is the LoxP site of SEQ ID NO: 12, and
[0148] said site C is the LoxN site of SEQ ID NO: 5, said first specific recombination site of Cre-recombinase being site A;

[0149] or such as
[0150] said site A is the LoxN site of SEQ ID NO: 5
[0151] said site B is the LoxP site of SEQ ID NO: 12, and
[0152] said site C is the LoxP site of SEQ ID NO: 12, said first specific recombination site of Cre-recombinase being site B;

[0153] or such as
[0154] said site A is the LoxP site of SEQ ID NO: 12
[0155] said site B is LoxN site of SEQ ID NO: 5, and
[0156] said site C is the LoxP site of SEQ ID NO: 12, said first specific recombination site of Cre-recombinase being site A;

[0157] or such as
[0158] said site A is the LoxP site of SEQ ID NO: 12
[0159] said site B is LoxN site of SEQ ID NO: 5, and
[0160] said site C is the LoxN site of SEQ ID NO: 5, said first specific recombination site of Cre-recombinase being site B.

[0161] According to a particular method of realization, the present invention concerns a mutant strain of Toxoplasma spp. in which both genes mic 1 and mic 3, and the gene rop16I are deleted, and which contains at the locus of each of these deleted genes a specific recombination site of an enzyme allowing a specific recombination, in particular Cre-recombinase, such as the locus-specific recombination site of the deleted mic1 gene is different from the locus-specific recombination site of the deleted mic3 gene,

[0162] and the locus-specific recombination site of the deleted rop16I gene is different from the specific recombination site at the locus of the deleted mic1 gene and the specific recombination site at the locus of the deleted mic3 gene.

[0163] The rop16 gene is used to encode the Rop16 protein, which is a rophtria protein. This protein is a threonine serine kinase.

[0164] These ROPs proteins are secreted to allow the invagination of the plasma membrane of the host cell and the formation of the parasitophoric vacuole. PORs released into the cytosol of the host cell can migrate to the surface of the parasitophoric vacuole (ROP5, ROP18, ROP2) or into the nucleus (ROP16, protein phosphatase 2C or PP2C-hn), allowing modulation of the expression of genes involved in the host's immune response.

[0165] According to a particular mode of realization, the present invention concerns a mutant strain of Sarcocystidae in which the said mutant strain is a mutant strain of Toxoplasma spp. and in which the rop16I gene is deleted,

[0166] and which contains a specific recombination site of an enzyme allowing a specific recombination, in particular Cre-recombinase, at the locus of said deleted rop16I gene, said site being different from said specific recombination site located at the locus of the deleted mic1 gene and said specific recombination site located at the locus of the deleted mic3 gene.

[0167] According to a particular method of realization, the present invention concerns a mutant strain of Toxoplasma spp. in which both genes mic 1 and mic 3, and the gene rop16I are deleted, and which contains at the locus of each of these deleted genes a specific recombination site of an enzyme allowing a specific recombination, in particular Cre-recombinase, such as

[0168] the locus-specific recombination site of the deleted mic1 gene is different from the locus-specific recombination site of the deleted mic3 gene,

[0169] and the locus-specific recombination site of the deleted rop16I gene is different from the specific recombination site at the locus of the deleted mic1 gene and the specific recombination site at the locus of the deleted mic3 gene.

[0170] and wherein said mutant strain also contains at the locus of the rop16I gene, downstream of said locus-specific recombination site of the deleted rop16I gene, a gene encoding the protein GRA15II, as well as the means necessary for the expression of said protein,

[0171] GRAs proteins are associated with the membranous nanotubular network and the membrane of the parasitophoric vacuole (Mercier et al., Int J Parasitol. 2005 July; 35(8):829-49. Review. Erratum in: Int J Parasitol. 2005 December; 35(14):1611-2). They participate in the exchange of nutrients between the parasite and the organelles (mitochondria and endoplasmic reticulum) of the host cell (Sibley, Immunol Rev. 2011 March; 240(1):72-91).

[0172] Recently, some proteins in dense granules, including GRA15, have been identified as proteins that play a role in modulating/controlling the host cell's immune response. GRA15 has a polymorphism according to the typology of the parasite (I, II, III . . . ).

[0173] In this mode of realization, the said gene encoding the GRA15II protein at the locus of the deleted rop16I gene is therefore flanked upstream by the said specific recombination site of an enzyme allowing a specific recombination, in particular Cre-recombinase, at the locus of the said deleted rop16I gene.

[0174] According to a particular method of realization, the present invention concerns a mutant strain of Sarcocystidae in which the said mutant strain is a mutant strain of Toxoplasma spp, and in which the rop16I gene is deleted and contains a recombination site specific for an enzyme allowing a specific recombination, in particular Cre-recombinase, at the locus of said deleted rop16I gene,

[0175] said site being different from said specific recombination site located at the locus of the deleted midi gene and said specific recombination site located at the locus of the deleted mic3 gene,

[0176] and said strain comprising a gene encoding the protein GRA15II as well as the means necessary for the expression of said protein at the locus of said deleted rop16I gene, said gene encoding the GRA15II protein at the locus of said deleted rop16I gene, being flanked upstream by said enzyme-specific recombination site allowing specific recombination, in particular Cre-recombinase, at the locus of said deleted rop16I gene.

[0177] According to a particular method of realization, the present invention concerns a mutant strain of Toxoplasma spp. in which both genes mic 1 and mic 3, and the gene rop16I are deleted,

[0178] and which contains at the locus of each of these deleted genes a specific recombination site of the Cre-recombinase, such as

[0179] the specific recombination site of Cre-recombinase at the locus of the deleted mic1 gene is different from the specific recombination site at the locus of the deleted mic3 gene,

[0180] and the specific recombination site of Cre-recombinase at the locus of the deleted rop16I gene is different from the specific recombination site of Cre-recombinase at the locus of the deleted mic1 gene and the specific recombination site of Cre-recombinase at the locus of the deleted mic3 gene

[0181] said specific recombination site of the Cre-recombinase at the locus of the deleted rop16I gene is selected from the following sites: LoxN of SEQ ID NO: 5, LoxP of SEQ ID NO: 12 and Lox2272 of SEQ ID NO: 68.

[0182] According to a particular method of realization, the present invention concerns a mutant strain of Toxoplasma spp. in which both genes mic 1 and mic 3, and the gene rop16I are deleted, and which contains at the locus of each of these deleted genes a specific recombination site of the Cre-recombinase, such as

[0183] the specific recombination site of Cre-recombinase at the locus of the deleted mic1 gene is different from the specific recombination site at the locus of the deleted mic3 gene,

[0184] and the specific recombination site of Cre-recombinase at the locus of the deleted rop16I gene is different from the specific recombination site of Cre-recombinase at the locus of the deleted mic1 gene and the specific recombination site of Cre-recombinase at the locus of the deleted mic3 gene

[0185] said specific recombination sites of Cre-recombinase at the location of the deleted mid, mic3 and rop16I genes are selected from the following sites: LoxN of SEQ ID NO: 5, LoxP of SEQ ID NO: 12 and Lox2272 of SEQ ID NO: 68,

[0186] such that these three sites are different from each other.

[0187] According to a particular method of realization, the present invention concerns a mutant strain of Toxoplasma spp. in which both genes mic 1 and mic 3, and the gene rop16I are deleted, and which contains at the locus of each of these deleted genes a specific recombination site of the Cre-recombinase, such as

[0188] the specific recombination site of Cre-recombinase at the locus of the deleted mic1 gene is different from the specific recombination site at the locus of the deleted mic3 gene,

[0189] and the specific recombination site of Cre-recombinase at the locus of the deleted rop16I gene is different from the specific recombination site of Cre-recombinase at the locus of the deleted mic1 gene and the specific recombination site of Cre-recombinase at the locus of the deleted mic3 gene,

[0190] and wherein said mutant strain also contains at the locus of the rop16I gene, downstream of said locus-specific recombination site of the deleted rop16I gene, a gene encoding the protein GRA15II as well as the means necessary for the expression of said protein,

[0191] said specific recombination site of the Cre-recombinase at the locus of the deleted rop16I gene is selected from the following sites: LoxN of SEQ ID NO: 5, LoxP of SEQ ID NO: 12 and Lox2272 of SEQ ID NO: 68.

[0192] According to a particular method of realization, the present invention concerns a mutant strain of Sarcocystidae in which said enzyme allowing specific recombination is Cre-recombinase, and said site of specific recombination of an enzyme allowing locus-specific recombination of said deleted rop16I gene, is a site of specific recombination of Cre-recombinase chosen from the following sites: LoxN of SEQ ID NO: 5, LoxP of SEQ ID NO: 12 and Lox2272 of SEQ ID NO: 68,

[0193] this specific recombination site being different from the specific recombination sites of Cre-recombinase at the locus of the deleted mic1 gene and at the locus of the deleted mic3 gene.

[0194] According to a particular method of realization, the present invention concerns a mutant strain of Toxoplasma spp. in which both genes mic 1 and mic 3, and the gene rop16I are deleted, and which contains at the locus of each of these deleted genes a specific recombination site of the Cre-recombinase, such as

[0195] the specific recombination site of Cre-recombinase at the locus of the deleted mic1 gene (called site A) is different from the specific recombination site at the locus of the deleted mic3 gene (called site B),

[0196] and the specific recombination site of Cre-recombinase at the locus of the deleted rop16I gene (called site D) is different from the specific recombination site of Cre-recombinase at the locus of the deleted mic1 gene (called site A) and the specific recombination site of

[0197] Cre-recombinase at the locus of the deleted mic3 gene (called site B), such as
[0198] said site A corresponds to a LoxN site of SEQ ID NO: 5
[0199] said site B corresponds to a LoxP site of SEQ ID NO: 12
[0200] said site D corresponds to a Lox2272 site of SEQ ID NO: 68;

[0201] or such as
[0202] said site A corresponds to a LoxP site of SEQ ID NO: 12
[0203] said site B corresponds to a LoxN site of SEQ ID NO: 5
[0204] said site D corresponds to a Lox2272 site of SEQ ID NO: 68.

[0205] Thus, according to a particular method of realization, the present invention concerns a mutant strain of Sarcocystidae in which the said mutant strain is a mutant strain of Toxoplasma spp, in which the two genes mic 1 and mic 3 are deleted, and containing two specific recombination sites of the Cre-recombinase, each of the two sites being respectively at the locus of each of the said deleted genes, the specific recombination site of the Cre-recombinase, at the locus of the deleted mic1 gene being different from that at the locus of the deleted mic3 gene.

[0206] wherein the rop16I gene is deleted and said strain contains a specific recombination site of the Cre-recombinase at the locus of said deleted rop16I gene,

[0207] said strain containing three specific recombination sites which are respectively:
[0208] site A corresponding to the specific recombination site of Cre-recombinase at the locus of the deleted mic1 gene
[0209] site B corresponding to the specific recombination site of Cre-recombinase at the locus of the deleted mic3 gene, and
[0210] the site D corresponding to the specific recombination site of the Cre-recombinase at the locus of said deleted rop16I gene

[0211] such as
[0212] said site A is the LoxN site of SEQ ID NO: 5
[0213] said site B is the LoxP site of SEQ ID NO: 12,
[0214] said site D is the Lox2272 site of SEQ ID NO: 68;

[0215] or such as
[0216] said site A is the LoxP site of SEQ ID NO: 12
[0217] said site B is the LoxN site of SEQ ID NO: 5,
[0218] said site D is the Lox2272 site of SEQ ID NO: 68.

[0219] According to a particular mode of realization, the present invention concerns a mutant strain, in which the said mutant strain is a mutant strain of Toxoplasma spp,

[0220] and wherein the rop16I gene is deleted and contains an enzyme-specific recombination site allowing locus-specific recombination of said deleted rop16I gene, said site being different from said specific recombination site located at the locus of the deleted mic1 gene and said specific recombination site located at the locus of the deleted mic3 gene

[0221] and said mutant strain comprising a gene encoding the protein GRA15II, as well as the means necessary for the expression of said protein at the locus of said deleted rop16I gene,

[0222] said gene encoding the protein GRA15II at the locus of said deleted rop16I gene, being flanked upstream by said enzyme-specific recombination site allowing locus-specific recombination of said deleted rop16I gene,

[0223] in particular in which said enzyme allowing specific recombination is Cre-recombinase, and said specific recombination site of an enzyme allowing locus-specific recombination of said deleted rop16I gene is a specific recombination site of Cre-recombinase selected from the following sites: LoxN of SEQ ID NO: 5, LoxP of SEQ ID NO: 12 and Lox2272 of SEQ ID NO: 68,

[0224] this specific recombination site being different from the specific recombination sites of Cre-recombinase at the locus of the deleted mic1 gene and at the locus of the deleted mic3 gene, said strain containing three specific recombination sites which are respectively:
[0225] site A corresponding to the specific recombination site of Cre-recombinase at the locus of the deleted mic1 gene
[0226] site B corresponding to the specific recombination site of Cre-recombinase at the locus of the deleted mic3 gene, and
[0227] the site D corresponding to the specific recombination site of the Cre-recombinase at the locus of said deleted rop16I gene

[0228] in particular such as
[0229] said site A is the LoxN site,
[0230] said site B is site LoxP,
[0231] said site D is site Lox2272.

[0232] According to a particular method of realization, the present invention concerns a mutant strain of Toxoplasma spp. in which both genes mic 1 and mic 3, and the gene rop16I are deleted, and which contains at the locus of each of these deleted genes a specific recombination site of the Cre-recombinase, such as

[0233] the specific recombination site of Cre-recombinase at the locus of the deleted mic1 gene (called site A) is different from the specific recombination site at the locus of the deleted mic3 gene (called site B),

[0234] and the specific recombination site of Cre-recombinase at the locus of the deleted rop16I gene (called site D) is different from the specific recombination site of Cre-recombinase at the locus of the deleted mic1 gene (called site A) and the specific recombination site of Cre-recombinase at the locus of the deleted mic3 gene (called site B),

[0235] said strain optionally containing a coder for the protein GRA15II as well as the means of expression necessary for the expression of said protein,

[0236] and said strain containing DNA heterologous at the locus of the deleted mic1 gene or the deleted mic3 gene or the deleted rop16I gene, different from the heterologous DNA corresponding to the specific recombination sites of the Cre-recombinase, at the respective locus of each of the deleted mic1, mic3 and rop16I genes, so that:
[0237] when said heterologous DNA is inserted at the locus of the deleted mic1 gene, it is flanked:
   [0238] a first Cre-recombinase-specific recombination site, corresponding to a Cre-recombinase-specific recombination site, at the locus of the deleted mic1 gene (site A), and
   [0239] a second specific recombination site (site C), identical to the first specific recombination site located at the locus of the deleted mic1 gene (site A),
[0240] when said heterologous DNA is inserted at the locus of the deleted mic3 gene, it is flanked:
   [0241] a first Cre-recombinase-specific recombination site, corresponding to a Cre-recombinase-specific recombination site, at the locus of the deleted mic3 gene (site B), and
   [0242] a second specific recombination site (site C), identical to the first specific recombination site located at the mic3 gene (site B) deleted,
[0243] when said heterologous DNA is inserted at the locus of the deleted rop16I gene, it is flanked:
   [0244] a first Cre-recombinase-specific recombination site, corresponding to a Cre-recombinase-specific recombination site, at the locus of the deleted rop16I gene (site D), and
   [0245] a second specific recombination site (site C), identical to the first specific recombination site located at the locus of the deleted rop16I gene (site D), it being understood that said strain comprises the elements necessary for the transcription of said heterologous DNA, or the means necessary for the expression of said heterologous DNA when said heterologous DNA encodes at least one protein.

[0246] In this particular mode of realization, said mutant strain then contains four specific recombination sites of cre-recombinase defined as follows:
[0247] the site A corresponding to said specific recombination site of Cre-recombinase at the locus of the deleted mic1 gene
[0248] the site B corresponding to said specific recombination site of Cre-recombinase at the locus of the deleted mic3 gene, and
[0249] site C corresponding to a Cre-recombinase specific recombination site at the locus of the deleted mic1 gene (site A) when heterologous DNA is inserted at the locus of the deleted mic1 gene or corresponding to a Cre-recombinase specific recombination site at the locus of the deleted mic3 gene (site B) when heterologous DNA is inserted at the locus of the deleted mic3 gene, or corresponding to a specific recombination site of Cre-recombinase at the locus of the deleted rop16I gene (site D) when heterologous DNA is inserted at the locus of the deleted rop16I gene
[0250] the site D corresponding to said specific recombination site of Cre-recombinase at the locus of said deleted rop16I gene

[0251] such as, when heterologous DNA is inserted at the locus of the deleted mic1 gene,
[0252] said site A corresponds to a LoxN site of SEQ ID NO: 5
[0253] said site B corresponds to a LoxP site of SEQ ID NO: 12
[0254] said site C corresponds to a LoxN site of SEQ ID NO: 5
[0255] said site D corresponds to a Lox2272 site of SEQ ID NO: 68;

[0256] or
[0257] said site A corresponds to a LoxP site of SEQ ID NO: 12
[0258] said site B corresponds to a LoxN site of SEQ ID NO: 5
[0259] said site C corresponds to a LoxP site of SEQ ID NO: 12
[0260] said site D corresponds to a Lox2272 site of SEQ ID NO: 68;

[0261] or such as when heterologous DNA is inserted at the locus of the deleted mic3 gene,
[0262] said site A corresponds to a LoxN site of SEQ ID NO: 5
[0263] said site B corresponds to a LoxP site of SEQ ID NO: 12
[0264] said site C corresponds to a LoxP site of SEQ ID NO: 12
[0265] said site D corresponds to a Lox2272 site of SEQ ID NO: 68;

[0266] or
[0267] said site A corresponds to a LoxP site of SEQ ID NO: 12
[0268] said site B corresponds to a LoxN site of SEQ ID NO: 5
[0269] said site C corresponds to a LoxN site of SEQ ID NO: 5
[0270] said site D corresponds to a Lox2272 site of SEQ ID NO: 68;

[0271] or such as when heterologous DNA is inserted at the locus of the deleted rop16I gene,
[0272] said site A corresponds to a LoxN site of SEQ ID NO: 5
[0273] said site B corresponds to a LoxP site of SEQ ID NO: 12
[0274] said site C corresponds to a Lox2272 site of SEQ ID NO: 68
[0275] said site D corresponds to a Lox2272 site of SEQ ID NO: 68;

[0276] or
[0277] said site A corresponds to a LoxP site of SEQ ID NO: 12
[0278] said site B corresponds to a LoxN site of SEQ ID NO: 5
[0279] said site C corresponds to a Lox2272, SEQ ID NO: 68
[0280] said site D corresponds to a Lox2272 site of SEQ ID NO: 68.

[0281] According to a particular method of implementation, the present invention concerns a mutant strain of Sarcocystidae in which the said mutant strain is a mutant strain of Toxoplasma spp. which enzyme allows a specific recombination is Cre-recombinase,

[0282] wherein the rop16I gene is deleted and said strain contains a specific recombination site of the Cre-recombinase at the locus of said deleted rop16I gene,

[0283] said strain containing four specific recombination sites which are respectively:
[0284] site A corresponding to the specific recombination site of Cre-recombinase at the locus of the deleted mic1 gene
[0285] site B corresponding to the specific recombination site of Cre-recombinase at the locus of the deleted mic3 gene, and
[0286] the site C corresponding to said second specific recombination site which flanks said heterologous DNA identical to said first specific recombination site, said first Cre-recombinase specific recombination site corresponding to said Cre-recombinase specific recombination site at the locus of the deleted mic1 gene (site A) or said Cre-recombinase specific recombination site at the locus of the deleted mic3 gene (site B), or to the Cre-recombinase specific recombination site at the locus of the deleted rop16I gene (site D)
[0287] the site D corresponding to the specific recombination site of the Cre-recombinase at the locus of said deleted rop16I gene

[0288] such as
[0289] said site A is the LoxN site of SEQ ID NO: 5
[0290] said site B is the LoxP site of SEQ ID NO: 12,
[0291] said site C is the LoxN site of SEQ ID NO: 5, said first specific recombination site of Cre-recombinase being site A, and
[0292] said site D is the Lox2272 site of SEQ ID NO: 68;

[0293] or such as
[0294] said site A is the LoxN site of SEQ ID NO: 5
[0295] said site B is the LoxP site of SEQ ID NO: 12,
[0296] said site C is the LoxP site of SEQ ID NO: 12, said first specific recombination site of Cre-recombinase being site B, and
[0297] said site D is the Lox2272 site of SEQ ID NO: 68;

[0298] or such as
[0299] said site A is the LoxP site of SEQ ID NO: 12
[0300] said site B is the LoxN site of SEQ ID NO: 5,
[0301] said site C is the LoxP site of SEQ ID NO: 12, said first specific recombination site of Cre-recombinase being site A, and
[0302] said site D is the Lox2272 site of SEQ ID NO: 68;

[0303] or such as
[0304] said site A is the LoxP site of SEQ ID NO: 12
[0305] said site B is the LoxN site of SEQ ID NO: 5,
[0306] said site C is the LoxN site of SEQ ID NO: 5, said first specific recombination site of Cre-recombinase being site B, and
[0307] said site D is the Lox2272 site of SEQ ID NO: 68;

[0308] or such as
[0309] said site A is the LoxP site of SEQ ID NO: 12
[0310] said site B is the LoxN site of SEQ ID NO: 5,
[0311] said site C is Lox2272 site SEQ ID NO: 68, said first specific recombination site of Cre-recombinase being site D, and
[0312] said site D is the Lox2272 site of SEQ ID NO: 68;

[0313] or such as
[0314] said site A is the LoxN site of SEQ ID NO: 5
[0315] said site B is the LoxP site of SEQ ID NO: 12,
[0316] said site C is Lox2272 site SEQ ID NO: 68, said first specific recombination site of Cre-recombinase being site D, and
[0317] said site D is the Lox2272 site of SEQ ID NO: 68.

[0318] According to a particular mode of realization, the present invention concerns a mutant strain of Sarcocystidae comprising a heterologous DNA as defined above, in which said heterologous DNA encodes a protein of interest.

[0319] According to a particular mode of realization, said heterologous DNA cited in any of the modes of realization previously described, is chosen from:

[0320] the sequence SEQ ID NO: 212 which codes for the protein SEQ ID NO: 208, the sequence SEQ ID NO: 213 which codes for the protein SEQ ID NO: 209, the sequence SEQ ID NO: 214 which codes for the protein SEQ ID NO: 210, the sequence SEQ ID NO: 215 which codes for the protein SEQ ID NO: 211, the sequence SEQ ID NO: 173 which codes for the protein SEQ ID NO: 167, or the sequence SEQ ID NO: 168 which codes for the protein SEQ ID NO: 165.

[0321] According to a particular mode of realization, said heterologous DNA cited in any of the modes of realization previously described, is chosen from:

[0322] a sequence encoding the protein SEQ ID NO: 208, a sequence encoding the protein SEQ ID NO: 209, a sequence encoding the protein SEQ ID NO: 210, a sequence encoding the protein SEQ ID NO: 211, a sequence encoding the protein SEQ ID NO: 167, or a sequence encoding the protein SEQ ID NO: 165, depending on the degeneration of the genetic code.

[0323] According to a particular mode of realization, the present invention concerns a mutant strain of Sarcocystidae comprising a heterologous DNA as defined above, wherein said protein of interest is an immunogenic heterologous antigen.

[0324] Immunogenic heterologous antigen” means any peptide or protein derived from an organism different from said mutant strain and capable of inducing an immune response.

[0325] An antigen can correspond to one or more epitopes.

[0326] According to a particular mode of realization, the present invention concerns a mutant strain of Sarcocystidae in which the said heterologous DNA encodes at least two proteins of interest and includes the means necessary for their expression, each of the said at least two proteins of interest being translated independently, i.e. they are each controlled by elements necessary for their independent translation.

[0327] According to a particular mode of realization, the present invention concerns a mutant strain of Sarcocystidae in which the said heterologous DNA encodes at least two proteins of interest and includes the means necessary for their expression, each of the said at least two proteins of interest being independently translated, and wherein said at least two proteins of interest are immunogenic heterologous antigens.

[0328] According to a particular mode of realization, the present invention concerns a mutant strain of Sarcocystidae comprising a heterologous DNA in which said heterologous DNA encodes at least one protein of interest and a resistance protein and the means necessary for the expression of said proteins, each of said proteins of interest and resistance being independently translated.

[0329] According to a particular mode of realization, the present invention concerns a mutant strain of Sarcocystidae comprising a heterologous DNA in which said heterologous DNA encodes at least one protein of interest and a resistance protein and the means necessary for expression of said proteins, each of said proteins of interest and resistance being independently translated, and in which said at least one protein of interest is an immunogenic heterologous antigen.

[0330] According to a particular mode of implementation, the present invention concerns a mutant strain of Sarcocystidae comprising a heterologous DNA encoding an immunogenic heterologous antigen as defined above, wherein said immunogenic heterologous antigen is an immunogenic heterologous virus antigen.

[0331] According to a particular method of implementation, the present invention concerns a mutant strain of Sarcocystidae comprising a heterologous DNA encoding an immunogenic heterologous antigen as defined above in which said immunogenic heterologous antigen is an immunogenic heterologous antigen of the Influenza virus.

[0332] According to a particular method of implementation, the present invention concerns a mutant strain of Sarcocystidae as defined above, comprising a heterologous DNA encoding an immunogenic heterologous antigen, wherein said immunogenic heterologous antigen is an immunogenic heterologous antigen of the Influenza virus selected from: the protein of SEQ ID NO: 208 (N-ter fragment of a human influenza virus I), or the protein of SEQ ID NO: 209 (N-ter fragment of the M2 protein of a swine influenza virus), or the protein of SEQ ID NO: 201 (N-ter fragment of the M2 protein of an avian influenza virusI) or the protein of SEQ ID NO: 211 (N-ter fragment of the M2 protein of an avian influenza virusII) or the protein of SEQ ID NO: 167, corresponding to the fusion, in order, of two proteins SEQ ID NO: 208, a protein SEQ ID NO: 209, a protein SEQ ID NO: 210 and a protein SEQ ID NO: 211, each spaced by a linker to allow a good conformation of the fusion protein SEQ ID NO: 167,

[0333] or the protein SEQ ID NO: 165, corresponding to the fusion, in order, of the SAG1 protein of T. gondii SEQ ID NO: 166, two proteins SEQ ID NO: 208, a protein SEQ ID NO: 209, a protein SEQ ID NO: 210 and a protein SEQ ID NO: 211.

[0334] According to another particular mode of realization, the two proteins SEQ ID NO: 208, the protein SEQ ID NO: 209, the protein SEQ ID NO: 210 and the protein SEQ ID NO: 211, can be fused in one of the following orders, always ensuring that they are spaced by a linker:

[0335] [‘SEQ ID NO: 211’, ‘SEQ ID NO: 208’, ‘SEQ ID NO: 210’, ‘SEQ ID NO: 208’, ‘SEQ ID NO: 209’]

[0336] [‘SEQ ID NO: 210’, ‘SEQ ID NO: 211’, ‘SEQ ID NO: 209’, ‘SEQ ID NO: 208’, ‘SEQ ID NO: 208’]

[0337] [‘SEQ ID NO: 210’, ‘SEQ ID NO: 208’, ‘SEQ ID NO: 211’, ‘SEQ ID NO: 208’, ‘SEQ ID NO: 209’]

[0338] [‘SEQ ID NO: 208’, ‘SEQ ID NO: 208’, ‘SEQ ID NO: 209’, ‘SEQ ID NO: 210’, ‘SEQ ID NO: 211’]

[0339] [‘SEQ ID NO: 210’, ‘SEQ ID NO: 209’, ‘SEQ ID NO: 208’, ‘SEQ ID NO: 211’, ‘SEQ ID NO: 208’]

[0340] [‘SEQ ID NO: 210’, ‘SEQ ID NO: 208’, ‘SEQ ID NO: 208’, ‘SEQ ID NO: 209’, ‘SEQ ID NO: 211’]

[0341] [‘SEQ ID NO: 210’, ‘SEQ ID NO: 211’, ‘SEQ ID NO: 208’, ‘SEQ ID NO: 209’, ‘SEQ ID NO: 208’]

[0342] [‘SEQ ID NO: 208’, ‘SEQ ID NO: 208’, ‘SEQ ID NO: 211’, ‘SEQ ID NO: 209’, ‘SEQ ID NO: 210’]

[0343] [‘SEQ ID NO: 210’, ‘SEQ ID NO: 208’, ‘SEQ ID NO: 211’, ‘SEQ ID NO: 209’, ‘SEQ ID NO: 208’]

[0344] [‘SEQ ID NO: 209’, ‘SEQ ID NO: 208’, ‘SEQ ID NO: 210’, ‘SEQ ID NO: 208’, ‘SEQ ID NO: 211’]

[0345] [‘SEQ ID NO: 210’, ‘SEQ ID NO: 208’, ‘SEQ ID NO: 208’, ‘SEQ ID NO: 211’, ‘SEQ ID NO: 209’]

[0346] [‘SEQ ID NO: 208’, ‘SEQ ID NO: 210’, ‘SEQ ID NO: 208’, ‘SEQ ID NO: 209’, ‘SEQ ID NO: 211’]

[0347] [‘SEQ ID NO: 209’, ‘SEQ ID NO: 211’, ‘SEQ ID NO: 208’, ‘SEQ ID NO: 208’, ‘SEQ ID NO: 210’]

[0348] [‘SEQ ID NO: 208’, ‘SEQ ID NO: 208’, ‘SEQ ID NO: 211’, ‘SEQ ID NO: 210’, ‘SEQ ID NO: 209’]

[0349] [‘SEQ ID NO: 209’, ‘SEQ ID NO: 211’, ‘SEQ ID NO: 208’, ‘SEQ ID NO: 210’, ‘SEQ ID NO: 208’]

[0350] [‘SEQ ID NO: 209’, ‘SEQ ID NO: 208’, ‘SEQ ID NO: 211’, ‘SEQ ID NO: 210’, ‘SEQ ID NO: 208’]

[0351] [‘SEQ ID NO: 208’, ‘SEQ ID NO: 209’, ‘SEQ ID NO: 210’, ‘SEQ ID NO: 211’, ‘SEQ ID NO: 208’]

[0352] [‘SEQ ID NO: 209’, ‘SEQ ID NO: 210’, ‘SEQ ID NO: 208’, ‘SEQ ID NO: 211’, ‘SEQ ID NO: 208’]

[0353] [‘SEQ ID NO: 211’, ‘SEQ ID NO: 208’, ‘SEQ ID NO: 210’, ‘SEQ ID NO: 209’, ‘SEQ ID NO: 208’]

[0354] [‘SEQ ID NO: 210’, ‘SEQ ID NO: 208’, ‘SEQ ID NO: 209’, ‘SEQ ID NO: 211’, ‘SEQ ID NO: 208’]

[0355] [‘SEQ ID NO: 211’, ‘SEQ ID NO: 209’, ‘SEQ ID NO: 210’, ‘SEQ ID NO: 208’, ‘SEQ ID NO: 208’]

[0356] [‘SEQ ID NO: 208’, ‘SEQ ID NO: 211’, ‘SEQ ID NO: 210’, ‘SEQ ID NO: 209’, ‘SEQ ID NO: 208’]

[0357] [‘SEQ ID NO: 208’, ‘SEQ ID NO: 210’, ‘SEQ ID NO: 208’, ‘SEQ ID NO: 211’, ‘SEQ ID NO: 209’]

[0358] [‘SEQ ID NO: 209’, ‘SEQ ID NO: 208’, ‘SEQ ID NO: 211’, ‘SEQ ID NO: 208’, ‘SEQ ID NO: 210’]

[0359] [‘SEQ ID NO: 210’, ‘SEQ ID NO: 209’, ‘SEQ ID NO: 211’, ‘SEQ ID NO: 208’, ‘SEQ ID NO: 208’]

[0360] [‘SEQ ID NO: 209’, ‘SEQ ID NO: 208’, ‘SEQ ID NO: 208’, ‘SEQ ID NO: 210’, ‘SEQ ID NO: 211’]

[0361] [‘SEQ ID NO: 208’, ‘SEQ ID NO: 211’, ‘SEQ ID NO: 208’, ‘SEQ ID NO: 209’, ‘SEQ ID NO: 210’]

[0362] [‘SEQ ID NO: 209’, ‘SEQ ID NO: 210’, ‘SEQ ID NO: 208’, ‘SEQ ID NO: 208’, ‘SEQ ID NO: 211’]

[0363] [‘SEQ ID NO: 209’, ‘SEQ ID NO: 208’, ‘SEQ ID NO: 210’, ‘SEQ ID NO: 211’, ‘SEQ ID NO: 208’]

[0364] [‘SEQ ID NO: 211’, ‘SEQ ID NO: 210’, ‘SEQ ID NO: 209’, ‘SEQ ID NO: 208’, ‘SEQ ID NO: 208’]

[0365] [‘SEQ ID NO: 208’, ‘SEQ ID NO: 208’, ‘SEQ ID NO: 209’, ‘SEQ ID NO: 211’, ‘SEQ ID NO: 210’]

[0366] [‘SEQ ID NO: 208’, ‘SEQ ID NO: 211’, ‘SEQ ID NO: 209’, ‘SEQ ID NO: 210’, ‘SEQ ID NO: 208’]

[0367] [‘SEQ ID NO: 208’, ‘SEQ ID NO: 211’, ‘SEQ ID NO: 209’, ‘SEQ ID NO: 208’, ‘SEQ ID NO: 210’]

[0368] [‘SEQ ID NO: 209’, ‘SEQ ID NO: 210’, ‘SEQ ID NO: 211’, ‘SEQ ID NO: 208’, ‘SEQ ID NO: 208’]

[0369] [‘SEQ ID NO: 208’, ‘SEQ ID NO: 208’, ‘SEQ ID NO: 210’, ‘SEQ ID NO: 209’, ‘SEQ ID NO: 211’]

[0370] [‘SEQ ID NO: 208’, ‘SEQ ID NO: 209’, ‘SEQ ID NO: 211’, ‘SEQ ID NO: 208’, ‘SEQ ID NO: 210’]

[0371] [‘SEQ ID NO: 211’, ‘SEQ ID NO: 209’, ‘SEQ ID NO: 208’, ‘SEQ ID NO: 208’, ‘SEQ ID NO: 210’]

[0372] [‘SEQ ID NO: 210’, ‘SEQ ID NO: 211’, ‘SEQ ID NO: 208’, ‘SEQ ID NO: 208’, ‘SEQ ID NO: 209’]

[0373] [‘SEQ ID NO: 208’, ‘SEQ ID NO: 211’, ‘SEQ ID NO: 208’, ‘SEQ ID NO: 210’, ‘SEQ ID NO: 209’]

[0374] [‘SEQ ID NO: 211’, ‘SEQ ID NO: 210’, ‘SEQ ID NO: 208’, ‘SEQ ID NO: 209’, ‘SEQ ID NO: 208’]

[0375] [‘SEQ ID NO: 208’, ‘SEQ ID NO: 210’, ‘SEQ ID NO: 211’, ‘SEQ ID NO: 208’, ‘SEQ ID NO: 209’]

[0376] [‘SEQ ID NO: 208’, ‘SEQ ID NO: 210’, ‘SEQ ID NO: 209’, ‘SEQ ID NO: 211’, ‘SEQ ID NO: 208’]

[0377] [‘SEQ ID NO: 211’, ‘SEQ ID NO: 208’, ‘SEQ ID NO: 208’, ‘SEQ ID NO: 209’, ‘SEQ ID NO: 210’]

[0378] [‘SEQ ID NO: 208’, ‘SEQ ID NO: 209’, ‘SEQ ID NO: 208’, ‘SEQ ID NO: 210’, ‘SEQ ID NO: 211’]

[0379] [‘SEQ ID NO: 208’, ‘SEQ ID NO: 208’, ‘SEQ ID NO: 210’, ‘SEQ ID NO: 211’, ‘SEQ ID NO: 209’]

[0380] [‘SEQ ID NO: 210’, ‘SEQ ID NO: 209’, ‘SEQ ID NO: 208’, ‘SEQ ID NO: 208’, ‘SEQ ID NO: 211’]

[0381] [‘SEQ ID NO: 209’, ‘SEQ ID NO: 211’, ‘SEQ ID NO: 210’, ‘SEQ ID NO: 208’, ‘SEQ ID NO: 208’]

[0382] [‘SEQ ID NO: 208’, ‘SEQ ID NO: 210’, ‘SEQ ID NO: 211’, ‘SEQ ID NO: 209’, ‘SEQ ID NO: 208’]

[0383] [‘SEQ ID NO: 210’, ‘SEQ ID NO: 208’, ‘SEQ ID NO: 209’, ‘SEQ ID NO: 208’, ‘SEQ ID NO: 211’]

[0384] [‘SEQ ID NO: 211’, ‘SEQ ID NO: 210’, ‘SEQ ID NO: 208’, ‘SEQ ID NO: 208’, ‘SEQ ID NO: 209’]

[0385] [‘SEQ ID NO: 211’, ‘SEQ ID NO: 208’, ‘SEQ ID NO: 209’, ‘SEQ ID NO: 210’, ‘SEQ ID NO: 208’]

[0386] [‘SEQ ID NO: 211’, ‘SEQ ID NO: 209’, ‘SEQ ID NO: 208’, ‘SEQ ID NO: 210’, ‘SEQ ID NO: 208’]

[0387] [‘SEQ ID NO: 208’, ‘SEQ ID NO: 210’, ‘SEQ ID NO: 209’, ‘SEQ ID NO: 208’, ‘SEQ ID NO: 211’]

[0388] [‘SEQ ID NO: 211’, ‘SEQ ID NO: 208’, ‘SEQ ID NO: 208’, ‘SEQ ID NO: 210’, ‘SEQ ID NO: 209’]

[0389] [‘SEQ ID NO: 208’, ‘SEQ ID NO: 209’, ‘SEQ ID NO: 208’, ‘SEQ ID NO: 211’, ‘SEQ ID NO: 210’]

[0390] [‘SEQ ID NO: 208’, ‘SEQ ID NO: 209’, ‘SEQ ID NO: 210’, ‘SEQ ID NO: 208’, ‘SEQ ID NO: 211’]

[0391] [‘SEQ ID NO: 209’, ‘SEQ ID NO: 208’, ‘SEQ ID NO: 208’, ‘SEQ ID NO: 211’, ‘SEQ ID NO: 210’]

[0392] [‘SEQ ID NO: 208’, ‘SEQ ID NO: 209’, ‘SEQ ID NO: 211’, ‘SEQ ID NO: 210’, ‘SEQ ID NO: 208’]

[0393] [‘SEQ ID NO: 211’, ‘SEQ ID NO: 208’, ‘SEQ ID NO: 209’, ‘SEQ ID NO: 208’, ‘SEQ ID NO: 210’]

[0394] [‘SEQ ID NO: 208’, ‘SEQ ID NO: 211’, ‘SEQ ID NO: 210’, ‘SEQ ID NO: 208’, ‘SEQ ID NO: 209’],

[0395] the protein resulting from the fusion of these proteins can also be expressed in fusion with the SAG1 protein of T. gondii SEQ ID NO: 166.

[0396] According to a particular method of implementation, the present invention concerns a mutant strain of Sarcocystidae as defined above, in which said immunogenic heterologous antigen is an immunogenic heterologous bacterial antigen.

[0397] According to a particular method of implementation, the present invention concerns a mutant strain of Sarcocystidae as defined above, in which said immunogenic heterologous antigen is an immunogenic heterologous parasite antigen.

[0398] According to a particular method of execution, said heterologous DNA codes for an immunogenic heterologous antigen of viruses, parasites or bacteria, and in particular consists of the nucleotide sequence SEQ ID NO: 173, encoding the antigen of the Influenza virus SEQ ID NO: 167.

[0399] According to a particular mode of realization, the present invention concerns a mutant strain of Sarcocystidae as defined above in which said mutant strain is a strain of Toxoplasma gondii and in which the mic1 gene and the mic3 gene are deleted and in which
[0400] the specific recombination site of Cre-recombinase at the locus of the deleted mic1 gene is the LoxN site of SEQ ID NO: 5 and
[0401] the specific recombination site of Cre-recombinase at the locus of the deleted mic3 gene is the LoxP site of SEQ ID NO: 12.

[0402] According to a particular mode of realization, the present invention concerns a mutant strain of Sarcocystidae as defined above in which said mutant strain is a strain of Toxoplasma gondii, in which the mic1 gene and the mic3 gene are deleted and in which
[0403] the specific recombination site of Cre-recombinase at the locus of the deleted mic1 gene is the LoxN site of SEQ ID NO: 5 and
[0404] the specific recombination site of Cre-recombinase at the locus of the deleted mic3 gene is the LoxP site of SEQ ID NO: 12.

[0405] said strain comprising a heterologous DNA SEQ ID NO: 168 allowing the expression of a protein SEQ ID NO: 165,

[0406] said heterologous DNA being at the locus of the deleted mic1 gene, and being flanked upstream by a first recombination site corresponding to said specific recombination site of the deleted mic1 gene is the LoxN site of SEQ ID NO: 5 and downstream by a second specific recombination site of the Cre-combinase LoxN of SEQ ID NO: 5.

[0407] According to a particular mode of realization, the present invention concerns a mutant strain of Sarcocystidae as defined above in which said mutant strain is a strain of Toxoplasma gondii, in which the mic1 gene and the mic3 gene are deleted and in which
[0408] the specific recombination site of Cre-recombinase at the locus of the deleted mic1 gene is the LoxN site of SEQ ID NO: 5 and
[0409] the specific recombination site of Cre-recombinase at the locus of the deleted mic3 gene is the LoxP site of SEQ ID NO: 12.

[0410] said strain comprising a heterologous DNA SEQ ID NO: 168 allowing the expression of a protein SEQ ID NO: 165,

[0411] said heterologous DNA being at the locus of the deleted mic3 gene, and being flanked upstream by a first recombination site corresponding to said specific recombination site of the deleted mic3 gene is the LoxP site of SEQ ID NO: 12 and downstream by a second specific recombination site of the Cre-combinase LoxP of SEQ ID NO: 12.

[0412] According to a particular method of realization, the present invention concerns a mutant strain of Sarcocystidae, said mutant strain being a strain of Toxoplasma gondii, in which the mic 1 genes, the mic 3 gene, and the rop16I gene are deleted, and in which
[0413] the specific recombination site of Cre-recombinase at the locus of the deleted mic1 gene is the LoxN site of SEQ ID NO: 5, and
[0414] the specific recombination site of Cre-recombinase at the locus of the deleted mic3 gene is the LoxP site of SEQ ID NO: 12, and
[0415] the specific recombination site of Cre-recombinase at the locus of the deleted rop16I gene is Lox2272 site of SEQ ID NO: 68.

[0416] According to a particular mode of realization, the present invention concerns a mutant strain according to the invention, wherein the said mutant strain is a strain of Toxoplasma gondii selected from
[0417] a strain in which
   [0418] the mic1 gene and the mic3 gene are deleted and wherein the specific recombination site of the Cre-recombinase at the locus of the deleted mic1 gene is the LoxN site of SEQ ID NO: 5 and
   [0419] the specific recombination site of Cre-recombinase at the locus of the deleted mic3 gene is the LoxP site of SEQ ID NO: 12.
[0420] a strain in which the mic 1 gene, the mic 3 gene and the rop16I gene are deleted, and comprising a gene encoding the protein GRA15II, as well as the means necessary for the expression of said protein, at the locus of said deleted rop16I gene,
[0421] said gene encoding the protein GRA15II at the locus of said deleted rop16I gene, being flanked upstream by a recombination site specific for Cre-recombinase, in which
   [0422] the specific recombination site of Cre-recombinase at the locus of the deleted mic1 gene is the LoxN site of SEQ ID NO: 5, and
   [0423] the specific recombination site of Cre-recombinase at the locus of the deleted mic3 gene is the LoxP site of SEQ ID NO: 12, and
   [0424] said Cre-recombinase specific recombination site which upstream flanks said gene encoding the GRA15II protein at the locus of the deleted rop16I gene, is the Lox2272 site of SEQ ID NO: 68.

[0425] According to a particular method of implementation, the present invention concerns a mutant strain of Toxoplasma spp. wherein the genes mic1, mic3 and rop16I are deleted, containing three Cre-recombinase specific recombination sites, at the respective locus of each of said deleted genes, the Cre-recombinase specific recombination site, at the locus of the deleted mic1 gene being different from that at the locus of the deleted mic3 gene and the recombination site specific to the locus of the deleted rop16I gene being different from the recombination sites specific to the loci of the deleted mic1 and mic3 genes and said strain containing DNA heterologous to the locus of the deleted mic1 gene or the locus of the deleted mic3 gene or the locus of the deleted rop16I gene, said heterologous DNA being different from heterologous DNA corresponding to the specific recombination sites of the Cre-recombinase, at the respective locus of each of the deleted mic1, mic3 and rop16I genes, in such a way that:
[0426] when said heterologous DNA is inserted at the locus of the deleted mic1 gene, it is flanked:
   [0427] a first Cre-recombinase-specific recombination site, corresponding to a Cre-recombinase-specific recombination site, at the locus of the deleted mic1 gene (site A), and
   [0428] a second Cre-recombinase specific recombination site (site C), identical to the first Cre-recombinase specific recombination site located at the locus of the deleted mic1 gene (site A),
[0429] when said heterologous DNA is inserted at the locus of the deleted mic3 gene, it is flanked:
   [0430] a first Cre-recombinase-specific recombination site, corresponding to a Cre-recombinase-specific recombination site, at the locus of the deleted mic3 gene (site B), and
   [0431] a second Cre-recombinase specific recombination site (site C), identical to the first Cre-recombinase specific recombination site located at the mic3 gene (site B) deleted,
[0432] when said heterologous DNA is inserted at the locus of the deleted rop16I gene, it is flanked:
   [0433] a first Cre-recombinase-specific recombination site, corresponding to a Cre-recombinase-specific recombination site, at the locus of the deleted rop16I gene (site D), and
   [0434] a second Cre-recombinase specific recombination site (site C), identical to the first Cre-recombinase specific recombination site located at the locus of the deleted rop16I gene (site D),

[0435] said strain comprising the elements necessary for the transcription of said heterologous DNA, or the means necessary for the expression of said heterologous DNA when said heterologous DNA encodes at least one protein,

[0436] said mutant strain then containing four specific recombination sites of Cre-recombinase defined as follows:
[0437] the site A corresponding to said specific recombination site of Cre-recombinase at the locus of the deleted mic1 gene
[0438] the site B corresponding to said specific recombination site of Cre-recombinase at the locus of the deleted mic3 gene, and
[0439] site C corresponding to a Cre-recombinase specific recombination site at the locus of the deleted mic1 gene (site A) when heterologous DNA is inserted at the locus of the deleted mic1 gene or corresponding to a Cre-recombinase specific recombination site at the locus of the deleted mic3 gene (site B) when heterologous DNA is inserted at the locus of the deleted mic3 gene, or corresponding to a specific recombination site of Cre-recombinase at the locus of the deleted rop16I gene (site D) when heterologous DNA is inserted at the locus of the deleted rop16I gene
[0440] the site D corresponding to said specific recombination site of Cre-recombinase at the locus of said deleted rop16I gene

[0441] such as, when heterologous DNA is inserted at the locus of the deleted mic1 gene,
[0442] said site A corresponds to a LoxN site of SEQ ID NO: 5
[0443] said site B corresponds to a LoxP site of SEQ ID NO: 12
[0444] said site C corresponds to a LoxN site of SEQ ID NO: 5
[0445] said site D corresponds to a Lox2272 site of SEQ ID NO: 68;

[0446] or such as when heterologous DNA is inserted at the locus of the deleted mic3 gene,
[0447] said site A corresponds to a LoxN site of SEQ ID NO: 5
[0448] said site B corresponds to a LoxP site of SEQ ID NO: 12
[0449] said site C corresponds to a LoxP site of SEQ ID NO: 12
[0450] said site D corresponds to a Lox2272 site of SEQ ID NO: 68;

[0451] or such as when heterologous DNA is inserted at the locus of the deleted rop16I gene,
[0452] said site A corresponds to a LoxN site of SEQ ID NO: 5
[0453] said site B corresponds to a LoxP site of SEQ ID NO: 12
[0454] said site C corresponds to a Lox2272 site of SEQ ID NO: 68
[0455] said site D corresponds to a Lox2272 site of SEQ ID NO: 68.

[0456] According to a particular method of implementation, the present invention concerns a mutant strain of Sarcocystidae in which the said mutant strain is a strain of Neospora caninum and in which the mic1 gene and the mic3 gene are deleted and in which
[0457] the specific recombination site of Cre-recombinase at the locus of the deleted mic1 gene is the LoxP site of SEQ ID NO: 12 and
[0458] the specific recombination site of Cre-recombinase at the locus of the deleted mic3 gene is the LoxN site of SEQ ID NO: 5.

[0459] According to a particular mode of realization, the present invention concerns a mutant strain of Sarcocystidae as defined above in which said mutant strain is a strain of Neospora caninum, in which the mic1 gene and the mic3 gene are deleted and in which
[0460] the specific recombination site of Cre-recombinase at the locus of the deleted mic1 gene is the LoxP site of SEQ ID NO: 12.
[0461] the specific recombination site of Cre-recombinase at the locus of the deleted mic3 gene is the LoxN site of SEQ ID NO: 5 and

[0462] said strain comprising a heterologous DNA SEQ ID NO: 168 allowing the expression of a protein SEQ ID NO: 165,

[0463] said heterologous DNA being at the locus of the deleted mic1 gene, and being flanked upstream by a first recombination site corresponding to said specific recombination site of the deleted mic1 gene is the LoxP site of SEQ ID NO: 12 and downstream by a second specific recombination site of the Cre-combinase LoxP of SEQ ID NO: 12.

[0464] According to a particular mode of realization, the present invention concerns a mutant strain of Sarcocystidae as defined above in which said mutant strain is a strain of Neospora caninum, in which the mic1 gene and the mic3 gene are deleted and in which
[0465] the specific recombination site of Cre-recombinase at the locus of the deleted mic1 gene is the LoxP site of SEQ ID NO: 12.
[0466] the specific recombination site of Cre-recombinase at the locus of the deleted mic3 gene is the LoxN site of SEQ ID NO: 5 and

[0467] said strain comprising a heterologous DNA SEQ ID NO: 168 allowing the expression of a protein SEQ ID NO: 165,

[0468] said heterologous DNA being at the locus of the deleted mic3 gene, and being flanked upstream by a first recombination site corresponding to said specific recombination site of the deleted mic3 gene is the LoxN site of SEQ ID NO: 5 and downstream by a second specific recombination site of the LoxN Cre-recombinase of SEQ ID NO: 5.

[0469] This invention also concerns the use of a mutant strain as defined above, not containing heterologous DNA different from heterologous DNA corresponding to the specific recombination sites of Cre-recombinase at the respective locus of each of the said deleted genes, for the targeted insertion of heterologous DNA, with the exception of use for therapeutic purposes.

[0470] This invention also concerns a mutant strain containing heterologous DNA encoding an immunogenic heterologous antigen as defined above, for use as a medicinal product, in particular as a vaccine or as an immunostimulant.

[0471] According to a particular method of implementation, this invention also concerns a mutant strain containing a heterologous DNA encoding an immunogenic heterologous antigen as defined above, for its use in the prevention of infectious diseases of viral, parasitic or bacterial origin.

[0472] According to a particular method of implementation, this invention also concerns a mutant strain containing a heterologous DNA encoding an immunogenic heterologous antigen as defined above, for its use in the prevention of infectious diseases of viral, parasitic or bacterial origin in a mammal or birds.

[0473] According to a particular method of implementation, the present invention also concerns a mutant strain containing a heterologous DNA encoding an immunogenic heterologous antigen as defined above, for its use in the prevention of infectious diseases of viral, parasitic or bacterial origin in a mammal, the said mammal being in particular chosen from humans, ovidae, goats, pigs, cattle, equidae, camelids, canidae or felids.

[0474] According to a particular method of implementation, this invention also concerns a mutant strain containing a heterologous DNA encoding an immunogenic heterologous antigen as defined above, for its use in the prevention of infectious diseases of viral, parasitic or bacterial origin in a bird, the said bird being in particular chosen from hens, turkeys, guinea fowls, ducks, geese, quails, pigeons, pheasants, partridges, ostriches, rheas, emus and kiwifruit bred or kept in captivity for breeding, the production of meat or eggs for consumption or for the supply of restocking game.

[0475] According to a particular method of implementation, this invention also concerns a mutant strain containing a heterologous DNA encoding an immunogenic heterologous antigen as defined above, for its use in the prevention of an infectious disease affecting the digestive system, causing diarrhoea, affecting food digestibility or intestinal absorption.

[0476] According to a particular method of implementation, this invention also concerns a mutant strain containing a heterologous DNA encoding an immunogenic heterologous antigen as defined above, for its use in the prevention of an infectious pathology affecting the central or peripheral nervous system and all consequences on other systems associated therewith.

[0477] According to a particular method of implementation, this invention also concerns a mutant strain containing a heterologous DNA encoding an immunogenic heterologous antigen as defined above, for its use in the prevention of an infectious pathology affecting the musculoskeletal or articular system, in particular diseases of infectious origin causing myositis, arthritis or theft.

[0478] According to a particular method of implementation, this invention also concerns a mutant strain containing a heterologous DNA encoding an immunogenic heterologous antigen as defined above, its use in the prevention of an infectious pathology affecting the respiratory system and in particular catarrhal fevers, obstructive abscesses, perforations and emphysema of infectious origin, tracheitis, bronchitis, pneumonia, pleurisy or in the particular case of birds, aerosacculitis.

[0479] According to a particular method of implementation, this invention also concerns a mutant strain containing a heterologous DNA encoding an immunogenic heterologous antigen as defined above, for its use in the prevention of an infectious pathology affecting the reproductive system, fertility and fertility, in particular, an infectious pathology affecting the normal development of the male or female reproductive system, the physiology of the reproductive cycle in females, affecting the proper development of pregnancy in mammals including foetal development or affecting the quality of eggs, in particular, infectious pathologies inducing metritis, salpingitis, mastitis or egg fall syndrome.

[0480] According to a particular method of implementation, this invention also concerns a mutant strain containing a heterologous DNA encoding an immunogenic heterologous antigen as defined above, for its use in the prevention of a pathology of infectious origin affecting the cardiovascular system, bone marrow or blood, in particular in the prevention of diseases of infectious origin causing alteration in the genesis of blood figured elements and sepsis including associated consequences on other organs.

[0481] According to a particular method of implementation, this invention also concerns a mutant strain containing heterologous DNA encoding an immunogenic heterologous antigen as defined above, for use in preventing the carrying of viruses, bacteria or parasites by an animal or by-product thereof and having a potentially zoonotic character, in particular, for use in the prevention of carrying in Salmonella spp. in animals, zoonotic Escherichia spp., Clostridia, mycobacteria including tuberculosis.

[0482] According to a particular method of implementation, this invention also concerns a mutant strain containing a heterologous DNA encoding an immunogenic heterologous antigen as defined above, for its use in the prevention of viral infectious pathology caused by a virus belonging to the following groups:
[0483] Group I, II of the Baltimore Classification comprising viruses whose genome consists of DNA capable of infecting a mammal or bird, in particular a natural virus belonging to the Herpesviridae family, and more particularly the Epstein-Barr virus responsible for human mononucleosis, bovine herpes virus type I responsible for infectious bovine rhinotracheitis or the Marek disease virus in domestic poultry.
[0484] Group III, IV and V of the Baltimore Classification including viruses whose genome consists of single or double-stranded RNA and which are likely to affect a mammal or bird, in particular viruses belonging to the family Orthomyxoviridae and more particularly human, avian and porcine influenza viruses.
[0485] Group VI of the Baltimore Classification including RNA viruses requiring DNA retrotranscription for viral multiplication and capable of infecting a mammal or bird, in particular Retroviridae family viruses, such as human immunodeficiency virus (HIV), feline immunodeficiency virus (FIV), arthritis and caprine encephalitis virus or feline leucosis virus FELV.
[0486] Group VII of the Baltimore Classification including DNA viruses requiring RNA retrotranscription for viral multiplication and likely to infect a mammal or bird, in particular viruses of the Hepadnaviridae family, and more particularly human hepatitis B virus or beech duck hepatitis virus (DHBV).

[0487] According to a particular method of implementation, this invention concerns a mutant strain containing heterologous DNA encoding a heterologous antigen SEQ ID NO: 165, for use in the prevention of influenza caused by the influenza virus Influenza.

[0488] According to a particular method of implementation, this invention also concerns a mutant strain containing a heterologous DNA encoding an immunogenic heterologous antigen as defined above, for its use in the prevention of an infectious disease of bacterial origin (or caused by a toxin from a bacterium), said bacterium may belong to the following groups:
[0489] GRAM positive shells that are likely to affect a mammal or bird directly or through one of these by-products. In particular bacteria belonging to the genus Staphylococcus, Streptococcus or Enteroccoccus;
[0490] GRAM negative shells which are likely to affect directly or through one of these by-products, a mammal or a bird, in particular bacteria belonging to the genus Neisseria;
[0491] Positive GRAM bacilli that are likely to affect directly or through any of these by-products, a mammal or a bird, in particular bacteria belonging to the genera Listeria, Erysipelothryx, Corynebacterium or Bacillus;
[0492] Negative GRAM bacilli that are likely to affect directly or through one of these by-products, a mammal or a bird, in particular bacteria belonging to the Enterobacteriacae family. Pseudomonaceae, Vibrionaceae or belonging to the genera Escherichia, Brucella, Haemophilus, Pasteurella, Bordetella, Legionella, Ornithobacterium or Salmonella;
[0493] Bacteria in spiral form GRAM positive or negative which are likely to affect directly or through one of these by-products, a mammal or a bird, in particular bacteria belonging to the genus Treponema, Leptospira or Borrelia;
[0494] Bacteria of the mycoplasmic type which are likely to affect directly or through one of these by-products, a mammal or a bird, in particular bacteria belonging to the genera Mycoplasma and Ureaplasma;
[0495] Unsurprising bacteria with the ability to invade a mammal or bird cell, particularly bacteria belonging to the genera Chlamydia, Rickettsia or Micobacterium.

[0496] According to a particular method of implementation, this invention also concerns a mutant strain containing a heterologous DNA encoding an immunogenic heterologous antigen as defined above, for its use in the prevention of a pathology originating from a parasitic infection, the parasite may belong to the following groups:
[0497] Protozoa likely to directly affect a mammal or a bird, in particular protozoa belonging to the sporozoan, Rhizoflagellate, ciliate or genera Encephalitozoon, Enterocytozoon or blastocystis branch;
[0498] Nemathelminths likely to directly affect a mammal or a bird, in particular Nemathelminths belonging to the genus Trichuris, Ascaris, Anisakis, Necator, Strongyloids, Toxocara, Ancylostoma, Trichinella, Loa, Onchocerca, Wichereria, or Enterobius;
[0499] Plathelminths likely to directly affect a mammal or a bird, in particular Plathelminths belonging to the genera Fasciola, Paragonimus, Opisthorchis, Sasciolopsis, Dicrocoelium, Clonorchis, Taenia, Diphyllobothrium, Echinococcus, Multiceps, Hymenolepsis and Shistosoma;
[0500] Arthropods likely to be responsible for a disease or the vectorization of an infectious agent towards a mammal or a bird, in particular arthropods belonging to the order Anoplurae of heteroptera, Shiphonaptera, Diptera, Brachycera or Acarus.

[0501] According to a particular method of implementation, this invention also concerns a mutant strain containing a heterologous DNA encoding an immunogenic heterologous antigen as defined above, for its use as an immunostimulant.

[0502] “Immunostimulant” means that said mutant strain, possibly containing heterologous DNA encoding an immunogenic heterologous antigen, stimulates immune defences (such as a vaccine, for example).

[0503] This invention also concerns a pharmaceutical composition comprising a mutant strain as defined above and a pharmaceutically acceptable carrier.

[0504] According to a particular method of implementation, the present invention also concerns a pharmaceutical composition, comprising at least one product chosen from: an adjuvant, a stabilizer or a preservative, or a mixture thereof.

[0505] According to a particular method of implementation, the present invention concerns a pharmaceutical composition, formulated in the form of a unit dose varying from 10² to 10⁹ tachyzoites of a mutant strain as defined above.

[0506] This invention also concerns a vaccine composition comprising a mutant strain as defined above and a pharmaceutically acceptable carrier.

[0507] This invention also concerns a method for the prevention of an infectious disease of viral, parasitic or bacterial origin, including a step of administration to a mammal or bird of a mutant strain.

[0508] This invention also concerns a process for obtaining a mutant strain of Sarcocystidae in which the mic1 and mic3 genes are deleted, from a wild strain, comprising:
[0509] a step A comprising or consisting of deletion of the mic3 gene by homologous recombination and insertion of a selection cassette framed by two identical specific recombination sites, followed by excision of said selection cassette by cre-recombinase, following which only one of the two specific recombination sites framing the cassette remains integrated at the locus of said deleted mic3 gene,
[0510] a step B comprising or consisting of deletion of the mic1 gene by homologous recombination and insertion of a selection cassette framed by two identical specific recombination sites, followed by excision of said selection cassette by cre-recombinase, following which only one of the two specific recombination sites framing the cassette remains integrated at the locus of said deleted mic1 gene

[0511] the steps A and B can be carried out in an order A followed by B or B followed by A, and the two specific recombination sites framing the selection cassette inserted at the mic1 gene being different from the two specific recombination sites framing the selection cassette inserted at the mic3 gene.

[0512] This invention also concerns a process for obtaining a mutant strain of Sarcocystidae in which the genes mic1, mic3 and rop16I are deleted and in which a gene encoding the protein GRA15II is integrated into the locus of the deleted rop16I gene, from a wild strain, comprising:
[0513] A step A comprising or consisting of deletion of the mic3 gene by homologous recombination and insertion of a selection cassette framed by two identical specific recombination sites, followed by excision of said selection cassette by cre-recombinase, following which only one of the two specific recombination sites framing the cassette remains integrated at the locus of said deleted mic3 gene,
[0514] A step B comprising or consisting of deletion of the mic1 gene by homologous recombination and insertion of a selection cassette framed by two identical specific recombination sites, followed by a step of excision of said selection cassette by cre-recombinase, following which only one of the two specific recombination sites framing the cassette remains integrated at the locus of said deleted mic1 gene the two specific recombination sites framing the selection cassette inserted at the mic1 gene being different from the two specific recombination sites framing the selection cassette inserted at the mic3 gene
[0515] a step C comprising or consisting of deletion of the rop16I gene by homologous recombination and insertion of a cassette comprising a selection cassette framed by two specific recombination sites, and comprising downstream of this selection cassette a sequence encoding the gra15II gene, followed by a step of excision of said selection cassette by cre-recombinase, following which said sequence encoding the gra15II gene is then integrated at the locus of the rop16I gene deleted downstream of a single specific recombination site

[0516] the two specific recombination sites framing the selection cassette inserted at the locus of the rop16I gene being different from the two specific recombination sites framing the selection cassettes inserted at the locus of the mic1 and mic3 genes.

[0517] the steps A, B and C can be performed in an order A followed by B followed by C, or A followed by C followed by B, or B followed by A followed by C, or B followed by C followed by A, or C followed by A followed by B, or C followed by A followed by B, or C followed by B followed by A.

[0518] This invention also concerns a process for obtaining a mutant strain of Sarcocystidae in which the mic1 and mic3 genes are deleted and in which heterologous DNA is integrated into the locus of the deleted mic1 gene or the locus of the deleted mic3 gene, from a wild strain, comprising:
[0519] a step A comprising or consisting of deletion of the mic3 gene by homologous recombination and insertion of a selection cassette framed by two identical specific recombination sites, followed by excision of said selection cassette by cre-recombinase, following which only one of the two specific recombination sites framing the cassette remains integrated at the locus of said deleted mic3 gene,
[0520] a step B comprising or consisting of deletion of the mic1 gene by homologous recombination and insertion of a selection cassette framed by two identical specific recombination sites, followed by excision of said selection cassette by cre-recombinase, following which only one of the two specific recombination sites framing the cassette remains integrated at the locus of said deleted mic1 gene

[0521] the two specific recombination sites framing the selection cassette inserted at the mic1 gene being different from the two specific recombination sites framing the selection cassette inserted at the mic3 gene the steps A and B can be carried out in an order A followed by B or B followed by A, then
[0522] a step D comprising or consisting of the targeted insertion of a heterologous DNA flanked by a specific recombination site, said heterologous DNA is integrated at the locus of the deleted mic1 gene when the specific recombination site that flanks it corresponds to the specific recombination site located at the locus of the deleted mic1 gene,

[0523] said heterologous DNA is integrated into the locus of the deleted mic3 gene when the specific recombination site that flanks it corresponds to the specific recombination site located at the locus of the deleted mic3 gene

[0524] once integrated, said heterologous DNA will therefore be framed by two specific recombination sites.

[0525] This invention also concerns a process for obtaining a mutant Sarcocystidae strain in which the mic1, mic3 and rop16I genes are deleted and in which heterologous DNA is integrated into the deleted mic1 gene or the deleted mic3 gene and a gene encoding the GRA15II protein is integrated into the deleted rop16I gene, from a wild strain, comprising:
[0526] A step A comprising or consisting of deletion of the mic3 gene by homologous recombination and insertion of a first selection cassette framed by two identical specific recombination sites, followed by excision of said selection cassette by cre-recombinase, following which only one of the two specific recombination sites framing the cassette remains integrated at the locus of said deleted mic3 gene,
[0527] A step B comprising or consisting of deletion of the mic1 gene by homologous recombination and insertion of a selection cassette framed by two identical specific recombination sites, followed by excision of said selection cassette by cre-recombinase, following which only one of the two specific recombination sites framing the cassette remains integrated at the locus of said deleted mic1 gene

[0528] the two specific recombination sites framing the selection cassette inserted at the mic1 gene being different from the two specific recombination sites framing the selection cassette inserted at the mic3 gene
[0529] a step C comprising or consisting of deletion of the rop16I gene by homologous recombination and insertion of a cassette comprising a selection cassette framed by two specific recombination sites, these two specific recombination sites being different from the two specific recombination sites framing the selection cassette inserted at the mic1 gene and those framing the selection cassette inserted at the mic3 gene, and comprising downstream of this selection cassette a sequence coding for the gra15II gene,
[0530] followed by excision of said selection cassette by cre-recombinase, following which said sequence encoding the gra15II gene is then integrated at the locus of the rop16I gene deleted downstream of a single specific recombination site

[0531] the steps A, B and C can be performed in an order A followed by B followed by C, or A followed by C followed by B, or B followed by A followed by C, or B followed by C followed by A, or C followed by A followed by B, or C followed by A followed by B, or C followed by B followed by B followed by A, then
[0532] a step D comprising or consisting of the targeted insertion of a heterologous DNA flanked by a specific recombination site, said heterologous DNA is integrated at the locus of the deleted mic1 gene when the specific recombination site that flanks it corresponds to the specific recombination site located at the locus of the deleted mic1 gene,
[0533] said heterologous DNA is integrated into the locus of the deleted mic3 gene when the specific recombination site that flanks it corresponds to the specific recombination site located at the locus of the deleted mic3 gene,
[0534] said heterologous DNA is integrated into the locus of the deleted rop16 gene when the specific recombination site that flanks it corresponds to the specific recombination site located at the locus of the deleted rop16 gene,
[0535] once integrated, said heterologous DNA will therefore be framed by two specific recombination sites.

### DESCRIPTION OF THE FIGURES

[0536] FIG. 1: this figure is a schematic representation of recombination by the Cre/LoxP system applied to the X gene framed by identical LoxP sites.

[0537] FIG. 2-A: This figure is a schematic representation of the plasmid pNcMIC3-KO-CAT-GFP LoxN. This 10063 base pair plasmid includes the selection gene encoding the chimeric protein CAT-GFP under the control of the promoter of α-tubulin of Toxoplasma gondii to allow expression of the gene in the parasite. This selection cassette is framed by two identical LoxN sites of the same orientation, added by PCR. On either side of the cassette were inserted the homologous regions flanking the ncmic3 gene.

[0538] FIG. 2-B: This figure is a schematic representation of the plasmid pNcMIC1-KO-CAT-GFP LoxP. This plasmid of 10069 base pairs includes the selection gene encoding the chimeric protein CAT-GFP under the control of the promoter of α-tubulin of Toxoplasma gondii to allow the expression of the gene in the parasite. This selection cassette is framed by two identical LoxP sites of the same orientation, added by PCR. On either side of the cassette were inserted the homologous regions flanking the ncmic1 gene.

[0539] FIG. 2-C: This figure is a schematic representation of the plasmid pTSAG1-Cre Recombinase. This 4,694 base pair plasmid includes the gene encoding the CRE-Recombinase protein under the control of the promoter of the sag1 gene of Toxoplasma gondii to allow the expression of the gene in the parasite. Downstream of the gene encoding Cre Recombinase, the 3′ UTR sequence of the sag1 gene of Toxoplasma gondii is inserted to stabilize the mRNA encoding the Cre Recombinase protein.

[0540] FIG. 3-A: This figure illustrates the 4 steps to obtain the Neo ncmic1-3 KO 2G strain. The first homologous recombination step allows the integration of the gene encoding the CAT-GFP enzyme at the mic3 gene. Selection by chloramphenicol allows the simple mutant strain Neo ncmic3 KO to be amplified. In a second step, the gene encoding the CAT-GFP protein is deleted by action of Cre Recombinase. The third step allows the integration of the gene encoding the CAT-GFP enzyme at the mic1 gene. Selection by chloramphenicol amplifies the simple mutant strain Neo ncmic1-3 KO. Finally, in a final step, the gene encoding the CAT-GFP protein is deleted by the action of Cre Recombinase.

[0541] FIG. 3-B: This figure represents the electrophoretic profiles of the PCR products obtained respectively with the wild strain NC-1 of Neospora caninum, the strain Neo ncmic3 KO, the strain Neo ncmic3 KO 2G, the strain Neo ncmic1-3 KO and the strain Neo ncmic1-3 KO 2G using the PCR primer sets in Table 3.

[0542] FIG. 3-C: This figure represents the results of the sequencing obtained on the Neo ncmic1-3 KO 2G strain and confirms that the mic1 and mic3 genes have been deleted and replaced by LoxP and LoxN scars respectively.

[0543] FIG. 4-A: This figure illustrates the immunofluorescence analysis of the detection of MIC3 protein obtained respectively with the wild Neospora caninum strain NC-1 and Neo ncmic1-3 KO 2G using an antibody specifically directed against MIC3 protein.

[0544] FIG. 4-B: This figure illustrates the immunofluorescence analysis of CATGFP protein detection obtained respectively with wild Neospora caninum strain NC-1 and mutant Neospora caninum strains using the intrinsic fluorescence of CATGFP protein. This figure shows the presence of the CATGFP protein or the absence of the CATGFP protein following the action of Cre Recombinase.

[0545] FIG. 5-A: This figure is a schematic representation of the plasmid pTgMIC3-KO-CAT-GFP LoxP. This plasmid of 9,931 base pairs includes the selection gene encoding the chimeric protein CAT-GFP under the control of the promoter of α-tubulin of Toxoplasma gondii to allow the expression of the gene in the parasite. This selection cassette is framed by two identical LoxP sites of the same orientation, added by PCR. On either side of the cassette were inserted the homologous regions flanking the tgmic3 gene.

[0546] FIG. 5-B: This figure is a schematic representation of the plasmid pTgMIC1-KO-CAT-GFP LoxN. This plasmid of 10,285 base pairs includes the selection gene encoding the chimeric protein CAT-GFP under the control of the promoter of α-tubulin of Toxoplasma gondii to allow expression of the gene in the parasite. This selection cassette is framed by two identical LoxN sites of the same orientation, added by PCR. On either side of the cassette were inserted the homologous regions flanking the tgmic1 gene.

[0547] FIG. 6-A: This figure illustrates the 4 steps to obtain the Toxo tgmic1-3 KO 2G strain. The first homologous recombination step allows the integration of the gene encoding the CAT-GFP enzyme at the mic3 gene. Selection by chloramphenicol amplifies the simple mutant strain Toxo tgmic3 KO. In a second step, the gene encoding the CAT-GFP protein is deleted by action of Cre Recombinase. The third step allows the integration of the gene encoding the CAT-GFP enzyme at the mic1 gene. Selection by chloramphenicol amplifies the simple mutant strain Toxo tgmic1-3 KO. Finally, in a final step, the gene encoding the CAT-GFP protein is deleted by the action of Cre Recombinase.

[0548] FIG. 6-B: This figure represents the electrophoretic profiles of the PCR products obtained respectively with the wild RH strain of Toxoplasma gondii, the Toxo tgmic3 KO strain, the Toxo tgmic3 KO 2G strain, the Toxo tgmic1-3 KO strain and the final Toxo tgmic1-3 KO 2G strain using the PCR primer sets in Table 7.

[0549] FIG. 6-C: This figure represents the results of the sequencing obtained on the Toxo tgmic1-3 KO 2G strain and confirms that the mic1 and mic3 genes have been deleted and replaced by LoxN and LoxP scars respectively.

[0550] FIG. 7: this figure illustrates the immunofluorescence analysis of the detection of MIC1, MIC3 or CAT-GFP proteins obtained respectively with the wild RH strain of Toxoplasma gondii, the Toxo tgmic3 KO strain, the Toxo tgmic3 KO 2G strain, the Toxo tgmic1-3 KO strain and the Toxo tgmic1-3 KO 2G strain using an antibody specifically directed against the MIC1, MIC3 protein or directly with the intrinsic fluorescent properties of the CAT-GFP protein.

[0551] FIG. 8: This figure is a schematic representation of the plasmid pTgRop16KO-Gra15IIKI-CAT-GFP Lox2272. This plasmid of 12721 base pairs includes the selection gene encoding the chimeric protein CAT-GFP under the control of the promoter of α-tubulin of Toxoplasma gondii to allow the expression of the gene in the parasite. This selection cassette is framed by two identical Lox2272 sites of the same orientation, added by PCR. Downstream of this cassette was integrated the expression cassette used to code the Gra51HAII protein. Then on either side of these cassettes were inserted the homologous regions flanking the tgrop16 gene.

[0552] FIG. 9-A: This figure illustrates the 2 steps to obtain the Toxo tgmic1-3 KO rop16 KO GRA15II KI-2G strain. The first homologous recombination step allows the integration of the gene encoding the enzyme CAT-GFP and the gene gra15IIHA at the locus of the rop16 gene. Selection by chloramphenicol amplifies the mutant strain Toxo tgmic1-3 KO rop16 KO GRA15II KI. In a second step, the gene encoding the CAT-GFP protein is deleted by action of Cre Recombinase to obtain the Toxo tgmic1-3 KO rop16 KO GRA15II KI-2G strain.

[0553] FIG. 9-B: This figure represents the electrophoretic profiles of the PCR products obtained respectively with the strains Toxo tgmic1-3 KO 2G, Toxo tgmic1-3 KO rop16 KO GRA15II KI and Toxo tgmic1-3 KO rop16 KO GRA15II KI 2G.

[0554] FIG. 9-C: This figure represents the results of the sequencing obtained on the Toxo tgmic1-3 KO rop16 KO rop16 KO GRA15II KI 2G strain and confirms that the rop16 and cat-gfp genes have been deleted and replaced by the Lox2272 scar and the gra15HAII gene.

[0555] FIG. 10: This figure illustrates the immunofluorescence analysis of the detection of the GRA15 protein (via the HA tag) obtained respectively with the strains Toxo tgmic1-3 KO rop16 KO GRA15II KI and Toxo tgmic1-3 KO rop16 KO GRA15II KI-2G using an antibody specifically directed against the HA tag. This figure also illustrates the removal of the CATGFP cassette with the disappearance of GFP fluorescence for the Toxo tgmic1-3 KO rop16 KO GRA15II KI-2G strain.

[0556] FIG. 11-A: This figure illustrates the position of the nucleic primers used in this invention to detect the presence of the three genes ncmic3, ncmic1, cat-gfp in wild strains and/or mutant strains of Neo ncmic3 KO and/or Neo ncmic3 KO 2G and/or Neo ncmic1-3 KO and/or Neo ncmic1-3 KO 2G from Neospora caninum. The digits represent the numbering of the primer sequences (SEQ ID NO: x) defined in this application.

[0557] FIG. 11-B: This figure illustrates the position of the nucleic primers used in this invention to detect the presence of the three genes tgmic3, tgmic1, cat-gfp in wild strains and/or mutant strains of Toxo tgmic3 KO and/or Toxo tgmic3 KO 2G and/or Toxo tgmic1-3 KO and/or Toxo tgmic1-3 KO 2G from Toxoplasma gondii. The digits represent the numbering of the primer sequences (SEQ ID NO: x) defined in this application.

[0558] FIG. 11-C: This figure illustrates the position of the nucleic primers used in this invention to detect the presence of the three genes tgrop16, gra15II, cat-gfp in wild strains and/or mutant strains of Toxo tgmic1-3 KO rop16 KO Gra15II KI from Toxoplasma gondii. The digits represent the numbering of the primer sequences (SEQ ID NO: x) defined in this application.

[0559] FIG. 12: This figure illustrates the specific antibody titration against Neospora caninum in the serum of mice vaccinated 30 days previously with the NeoKO 2G strain. The vehicle having been used in control. n=2 per group. ANOVA two-way . . . .

[0560] FIG. 13-A: This figure illustrates the follow-up of clinical scores observed for mice.

[0561] FIG. 13-B: This figure illustrates the specific antibody titration against T. gondii in mouse serum at D-2, J28 and J129. ANOVA one way (****: p<0.0001, *: p<0.05).

[0562] FIG. 13-C: This figure illustrates the dosage of IFNγ following a restimulation of splenocytes with the total extract of T. gondii 72 hours after restimulation. ANOVA one way (****: p<0.0001, *: p<0.05). Batch 1 corresponds to the control group, batch 2 corresponds to the challenge group 76K, batch 3 corresponds to the Toxo tgmic group 1-3 KO 2G and batch 4 corresponds to the Toxo tgmic group 1-3 KO 2G+challenge 76K.

[0563] FIG. 13-D: This figure illustrates the number of brain cysts detected in mothers. ANOVA one way (*: p<0.05). Batch 1 corresponds to the control group, batch 2 corresponds to the challenge group 76K, batch 3 corresponds to the Toxo tgmic group 1-3 KO 2G and batch 4 corresponds to the Toxo tgmic group 1-3 KO 2G+challenge 76K.

[0564] FIG. 13-E: This figure illustrates the prolificity obtained for each batch.

[0565] FIG. 13-F: This figure illustrates the sex ratio obtained for each batch. Two-way ANOVA (**: p<0.01), *: p<0.05).

[0566] FIG. 13-G: This figure illustrates the results obtained for mortality.

[0567] FIG. 13-H: This figure illustrates the results obtained for observed mortality by litter for each batch. ANOVA one way (****: p<0.0001, ***: p<0.001). Batch 1 corresponds to the control group, batch 2 corresponds to the challenge group 76K, batch 3 corresponds to the Toxo tgmic group 1-3KO 2G and batch 4 corresponds to the Toxo tgmic group 1-3 KO 2G+challenge 76K.

[0568] FIG. 13-I: This figure illustrates the percentage of survival obtained for mice over 32 days. Log-rank (Mantel-Cox) test (****: p<0.0001). Batch 1 corresponds to the control group, batch 2 corresponds to the challenge group 76K, batch 3 corresponds to the Toxo tgmic group 1-3 KO 2G and batch 4 corresponds to the Toxo tgmic group 1-3 KO 2G+challenge 76K.

[0569] FIG. 13-J: This figure illustrates the follow-up of clinical scores observed for mice.

[0570] FIG. 13-K: This figure illustrates the specific IgM titration directed against T. gondii in the mouse serum of each batch. ANOVA one way (****: p<0.0001, **: p<0.01).

### EXAMPLE 1: CONSTRUCTION OF THE NEO NCMIC1-3 KO-2G STRAIN

[0571] Haploidy of the Neospora caninum genome during the proliferative phase allows the invalidation of a gene into a single homologous recombination.

[0572] Cultivation of Parasites

[0573] All tachyzoites of the Neospora caninum strain used were produced as human fibroblasts (HFF Hs27 ATCC CRL-1634) grown in a minimal Dulbecco medium (DMEM) supplemented with 10% fetal calf serum (SVF), 2 mM glutamine, 100 U/mL penicillin and 100 U/mL streptomycin. They were collected after mechanical lysis of the host cells by 3 passages in 25G syringes.

[0574] Plasmid Construction

[0575] Plasmid pNcMIC3-KO-CAT-GFP LoxN

[0576] The plasmid pNcMic3KO-CAT-GFP LoxN of SEQ ID NO: 1 contains a CAT-GFP selection cassette SEQ ID NO: 6 comprising the cat-gfp selection gene SEQ ID NO: 2 encoding the fusion protein CAT-GFP allowing both chloramphenicol resistance (CAT) and green fluorescence (GFP: Green Fluorescent Protein), under the control of the promoter of α-tubulin of Toxoplasma gondii SEQ ID NO: 3 to allow the expression of the gene in the parasite. Downstream of the cat-gfp gene SEQ ID: 2, the sequence 3′ UTR of the sag1 gene of Toxoplasma gondii SEQ ID NO: 4 is inserted. The objective of this sequence is to stabilize the mRNA encoding the CAT/GFP fusion protein. This SEQ ID NO: 6 selection cassette is framed by two identical SEQ ID NO: 5 LoxN sites of the same orientation.

[0577] To obtain this plasmid, the CAT-GFP selection cassette SEQ ID NO: 6 was amplified by PCR on the plasmid pT230 CAT-GFP SEQ ID NO: 9 with the cat-gfp LoxN For SEQ ID NO: 7 and catgfp LoxN rev SEQ ID NO: 8 (2380pb), digested by the restriction enzymes ClaI and XbaI (2348 bp) and cloned in the plasmid pNcMic3KO-DHFR SEQ ID NO: 10 digested by ClaI and XbaI (7715 bp).

[0578] The plasmid then obtained is the plasmid pNcMic3KO-CAT-GFP LoxN of SEQ ID NO: 1.

[0579] The sequences of the primers are shown in Table 1 below. The plasmid pNcMic3KO-CAT-GFP-GFP LoxN therefore contains a CAT-GFP cassette SEQ ID NO: 6 framed by a 5′ HR sequence of the ncmic3 gene SEQ ID NO: 98 and a 3′ HR sequence of the ncmic3 gene SEQ ID NO: 97.

TABLE 1
List of primers used for the construction
of the plasmid pNcMIC3-KO-CAT-GFP LoxN

| | | |
|---|---|---|
| catgfp loxN For | SEQ ID NO: 7 | ClaI |
| | TCCGCTCTCAGAGAATCGAT | LoxN |
| | GAAGCTTATAACTTCGTATA | |
| | GTATACCTTATACGAAGTTA | |
| | TGATATGCATGTCCGCGTTC | |
| | GTGAAATCTC | |
| catgfp loxN rev | SEQ ID NO: 8 | XbaI |
| | ATACGTAAACTTCTAGATCC | loxN |
| | ATAACTTCGTATAAGGTATA | |
| | CTATACGAAGTTATCCCTCG | |
| | GGGGGGCAAGAATTGTGTTA | |
| | ACCGGTTCGA | |

[0580] Plasmid pNcMIC1-KO-CAT-GFP Lox

[0581] The plasmid pNcMic1KO-CAT-GFP LoxP of SEQ ID NO: 11 contains a CAT-GFP selection cassette SEQ ID NO: 6 comprising the cat-gfp selection gene SEQ ID NO: 2 encoding a CAT-GFP fusion protein allowing both chloramphenicol resistance (CAT) and green fluorescence (GFP: Green Fluorescent Protein), under the control of the promoter of α-tubulin of Toxoplasma gondii SEQ ID NO: 3 to allow the expression of the gene in the parasite. Downstream of the CAT-GFP coding sequence, the 3′ UTR sequence of the sag1 gene of Toxoplasma gondii SEQ ID NO: 4 is inserted. The objective of this sequence is to stabilize the mRNA encoding the CAT/GFP fusion protein. This SEQ ID NO: 6 selection cassette is framed by two identical LoxP sites SEQ ID NO: 12 of the same orientation.

[0582] To obtain this plasmid, the CAT-GFP selection cassette SEQ ID NO: 6 was amplified by PCR on the plasmid pT230 CAT-GFP SEQ ID NO: 9 with CN10 primers SEQ ID NO: 13 and CN11 SEQ ID NO: 14 allowing the addition of the LoxP sites SEQ ID NO: 12 (2394 bp), digested by the restriction enzymes HindIII and BamHI (2339 bp) and cloned in the plasmid pT230-ble SEQ ID NO: 37 digested by HindIII and BamHI (2931 bp). The plasmid then obtained is the plasmid pT230 CAT-GFP LoxP of SEQ ID NO: 113.

[0583] The 3 HR region of the ncmic1 gene was amplified by PCR from the genomic DNA of Neospora caninum strain NC-1. For amplification, the 3 HR NCmic1 F KpnI and 3 HR NCmic1 R HindIII primers (SEQ ID NO: 114 and SEQ ID NO: 115) allow the amplification of the 3 HR region of the ncmic1 gene and the creation of two restriction sites that were used to clone the 3HR fragment upstream of the CAT-GFP selection cassette in pT230 CAT-GFP LoxP of SEQ ID NO: 113. The plasmid obtained is called pNcmic1-3HR CATGFP LoxP SEQ ID NO: 118.

[0584] The 5 HR region of the ncmic1 gene was amplified by PCR from the genomic DNA of Neospora caninum strain NC-1. For amplification, the 5 HR NCmic1 F BamHI and 5 HR NCmic1 R NotI primers (SEQ ID NO: 116 and SEQ ID NO: 117) allow the amplification of the 5′ UTR region of the ncmic1 gene and the creation of two restriction sites that were used to clone the 5HR fragment downstream of the CAT-GFP selection cassette in the plasmid pNcmic1-3HR CATGFP LoxP of SEQ ID NO: 118 (BamHI-NotI).

[0585] The plasmid then obtained is the plasmid pNcMic1KO-CAT-GFP LoxP of SEQ ID NO: 11. pNcMic1KO-CAT-GFP LoxP therefore contains a CAT-GFP cassette SEQ ID NO: 6 framed by a 5′ HR sequence of the ncmic1 gene SEQ ID NO: 96 and a 3′ HR sequence of the ncmic1 gene SEQ ID NO: 95.

[0586] The sequences of the primers are shown in Table 2 below.

TABLE 2
list of primers used for the construction
of the plasmid pNcmic1 KO CATGFP LoxP
Construction of the plasmid pNcmic1
KO CATGFP LoxP

| | | |
|---|---|---|
| CN10 | SEQ ID NO: 13 | HindIII, |
| | GCGGCCAAGCTTATAACTT | loxP |
| | CGTATAATGTATGCTATAC | |
| | GAAGTTATGATATGCATGT | |
| | CCGCgttcgtgaaatctct | |
| | gatcaagcgg | |
| CN11 | SEQ ID NO: 14 | SpeI, |
| | cgacgcacgctgtcactca | BamHI, |
| | acttgctGCTAGAACTAGT | loxP |
| | GGATCCATAACTTCGTATA | |
| | GCATACATTATACGAAGTT | |
| | ATCCCTCGGGGGGGCAAGA | |
| | ATT | |
| 3 HR | SEQ ID NO: 114 | KpnI |
| NCmic1 F | CGCGGTACCAGGCAGAAGT | |
| KpnI | AAAGAAGGTTCCTC | |
| 3 HR | SEQ ID NO: 115 | HindIII |
| NCmic1 R | CGCAAGCTTTGATCACGCA | |
| HindIII | AGAAAAGAAGC | |
| 5 HR | SEQ ID NO: 116 | BamHI |
| NCmic1 F | CGCGGATCCCATTTGTAGA | |
| BamHI | TACGGTTGCACAC | |
| 5 HR | SEQ ID NO: 117 | NotI |
| NCmicl R | CGCGCGGCCGCACATTCAG | |
| Notl | ACGGCAGAACTCTG | |

[0587] Plasmid pTSAG1-Cre Recombinase

[0588] The plasmid pT-SAG1-Cre-Recombinase SEQ ID NO: 15 was constructed to transiently express in the parasite Toxoplasma gondii and its genetically modified derivatives the gene encoding the Cre Recombinase protein derived from bacteriophage P1 (Brecht et al., 1999, same reference as above).

[0589] The plasmid pT-SAG1-Cre-Recombinase SEQ ID NO: 15 is derived from the plasmid pUC18 (commercial plasmid), which contains a cassette for the expression of Cre Recombinase from bacteriophage P1.

[0590] In the plasmid pT-SAG1-Cre-Recombinase SEQ ID NO: 15, the gene encoding the Cre Recombinase SEQ ID NO: 16 is placed under the dependence of the promoter of the sag1 gene of Toxoplasma gondii SEQ ID NO: 17, which allows the expression of the Cre Recombinase protein in transfected Toxoplasma gondii parasites. Downstream of the gene encoding Cre Recombinase, the 3′ UTR sequence of the sag1 gene of Toxoplasma gondii SEQ ID NO: 4 is inserted. The objective of this sequence is to stabilize the mRNA encoding the Cre Recombinase protein.

[0591] The absence of a specific selection cassette does not allow a stable integration of the transfected genetic material but only a transient expression of Cre Recombinase.

[0592] Construction of the Neomic1-3 KO-2G Strain

[0593] The construction of the second generation attenuated live strain, called Neo ncmic1-3 KO-2G, is done in 4 distinct steps:
[0594] 1. Deletion by homologous recombination of the ncmic3 gene and its replacement by the CAT-GFP selection cassette SEQ ID NO: 6 framed by LoxN sequences SEQ ID NO: 5.
   [0595] To obtain this strain, the wild strain NC-1 of Neospora caninum is electroporated with the plasmid pNcMIC3-KO-CAT-GFP LoxN of SEQ ID NO: 1. 20 μg of plasmid purified and linearized by KpnI are added to 10⁷ parasites suspended in the CYTOMIX electroporation medium containing ATP (3 mM) and Glutathione (3 mM) (Van den Hoff et al, Nucleic Acid Research, June 11; 20(11):2902), and electroporation was performed in a 4 mm gap cell, in a volume of 800 μL on a BioRad device (Parameters: 2000V, 50 ohms, 25 μF, with two electric shocks). After electroporation, the tachyzoites are deposited on a monolayer of HFF cells in culture. For mutant selection, the culture medium is replaced and supplemented by the selection agent (chloramphenicol 20 μM) 24 hours after electroporation. 10 to 15 days after selection, the parasites are subcloned in 96-well plate on a monolayer of HFF cells and the clones of interest are identified by PCR after performing DNA genomic DNA extraction from the clones of interest. The strain obtained is called Neo ncmic3 KO. In this strain, the mic3 gene has been deleted and replaced by the CATGFP selection cassette SEQ ID NO: 6. Thus, the theoretical sequence at the locus of the deleted mic3 gene containing the CATGFP selection cassette is SEQ ID NO: 101. Since the mic1 gene is not deleted, the sequence of the mic1 gene SEQ ID NO: 106 is present in the genome of the strain.
[0596] 2. Deletion of the selection cassette SEQ ID NO: 6: the obtained Neo ncmic3 KO strain is electroporated with the plasmid pT-SAG1-CRE-Recombinase SEQ ID NO: 15.
   [0597] The transiently expressed enzyme will allow the excision of the CAT-GFP selection cassette SEQ ID NO: 6. The electroporation protocol is similar to the previous one. After electroporation, the tachyzoites are deposited on a monolayer of HFF cells in culture. After 2 to 7 days of culture, the parasites are subcloned in 96-well plate on a monolayer of HFF cells and the clones of interest are identified by PCR after performing DNA genomic DNA extraction from the clones of interest. The strain obtained is called Neo ncmic3 KO-2G.
   [0598] In this strain, the mic3 gene was deleted and the CATGFP selection cassette SEQ ID NO: 6 was excised. Thus, the theoretical sequence at the locus of the deleted mic3 gene containing a single LoxP site SEQ ID NO: 12, is SEQ ID NO: 18. Since the mic1 gene is not deleted, the sequence of the mic1 gene SEQ ID NO: 106 is present in the genome of the strain.
[0599] 3. Deletion by homologous recombination of the ncmic1 gene and its replacement by the CAT-GFP selection cassette SEQ ID NO: 6 framed by LoxP sequences SEQ ID NO: 12.
   [0600] To obtain this strain, the Neo ncmic3 KO-2G strain is electroporated with the plasmid pNcMIC1-KO-CAT-GFP LoxP of SEQ ID NO: 11 linearized by KpnI, according to the protocol previously described. After electroporation, the tachyzoites are deposited on a monolayer of HFF cells in culture. For mutant selection, the culture medium is replaced and supplemented by the selection agent (chloramphenicol 20 μM) 24 hours after electroporation. 10 to 15 days after selection, the parasites are subcloned in 96-well plate on a monolayer of HFF cells and the clones of interest are identified by PCR after performing genomic DNA extraction from the clones of interest. The strain obtained is called Neo ncmic1-3 KO.
   [0601] In this strain, the mic3 gene was deleted and the CATGFP selection cassette SEQ ID NO: 6 was excised. Thus, the theoretical sequence at the locus of the deleted mic3 gene containing a single LoxP site SEQ ID NO: 12, is SEQ ID NO: 18. In this strain, the mic1 gene has been deleted and replaced by the CATGFP selection cassette SEQ ID NO: 6, so the theoretical sequence at the locus of the deleted mic1 gene containing the CATGFP selection cassette is SEQ ID NO: 102.
[0602] 4. Deletion of the selection cassette SEQ ID NO: 6: the obtained Neo ncmic1-3 KO strain is electroporated with the plasmid pT-SAG1-CRE-Recombinase SEQ ID NO: 15.
[0603] The transiently expressed enzyme will allow the excision of the CAT-GFP selection cassette SEQ ID NO: 6. After electroporation, the tachyzoites are deposited on a monolayer of HFF cells in culture. After 2 to 7 days of culture, the parasites are subcloned in 96-well plate on a monolayer of HFF cells and the clones of interest are identified by PCR after performing DNA genomic DNA extraction from the clones of interest. The strain obtained is called Neo ncmic1-3 KO-2G.
   [0604] In this strain, the mic3 gene was deleted and the CATGFP selection cassette SEQ ID NO: 6 was excised. Thus, the theoretical sequence at the locus of the deleted mic3 gene containing a single LoxP site SEQ ID NO: 12, is SEQ ID NO: 18.
   [0605] In this strain, the mic1 gene was deleted and the CATGFP selection cassette SEQ ID NO: 6 was excised. Thus, the theoretical sequence at the locus of the deleted mic1 gene containing a single LoxP site SEQ ID NO: 12, is SEQ ID NO: 91.

[0606] Validation of the Neo Ncmic1-3 KO-2G Strain by PCR

[0607] To validate the Neo ncmic1-3 KO-2G strain, PCR analyses are carried out using genomic DNA extracted with DNAzol from a parasitic pellet composed of 10⁷ parasites. The primers used for PCR are described in FIG. 11-A and are detailed in Table 3 below. PCR products are analyzed by agarose gel electrophoresis (FIG. 3-B). Their expected and observed sizes are also described in Table 4 below. For more clarity on FIG. 3-B, only the 3 steps of the realization are represented (ncmic3, ncmic3KO CATGFP and ncmic3KO LoxN (2G) or ncmic1, ncmic1KO CATGFP and ncmic1KO LoxP(2G)), the results obtained are in accordance with the expected sizes

TABLE 3
List of primers used for strain validation.

| | | Primer F | Sequence | | Primer R | Sequence |
|---|---|---|---|---|---|---|
| Ncmic3 | c | Nc mic3 F | SEQ ID NO: 22 | d | Nc mic3 R | SEQ ID NO: 23 |
| (mix1) | | | TTTCCCTTCTAAA | | | CCTTCAGTGGTTT |
| | | | CACAGTCG | | | TCTCCATGAGT |
| Validation | i | Integ | SEQ ID NO: 24 | j | ORF | SEQ ID NO: 25 |
| KO | | NCmic3 F | GAAAGTGTCAGTG | | CATGFP R | CCGTTTGGTGTGG |
| 5′Ncmic3 | | | GTAGAGACTGC | | | ATGTCTCTCTCT |
| (mix2) | | | | | | |
| Validation | k | ORF | SEQ ID NO: 26 | l | Integ | SEQ ID NO: 27 |
| KO | | CATGFP F | GCATCGACTTCAA | | NCmic3 R | TGTTTACAGGTCA |
| 3′Ncmic3 | | | GGAGGAGGAC | | | TCCAGAAAAGG |
| (mix3) | | | | | | |
| Scar | g | AF3 | SEQ ID NO: 32 | h | AF4 | SEQ ID NO: 33 |
| Ncmic3 | | | GTCATCGACCGCC | | | GCAGAGAGGTTCT |
| (mix4) | | | GCCGGAACTAGTA | | | GCGTATCTAACAC |
| | | | GT | | | ACGG |
| Ncmic1 | a | Nc mic1 F | SEQ ID NO: 20 | b | Nc mic1 R | SEQ ID NO: 21 |
| (mix5) | | | ACCCGGAGAATTA | | | TTCTCCAGGCACT |
| | | | TCGCCTA | | | CACCTCACCT |
| Validation | m | Integ | SEQ ID NO: 28 | j | ORF | SEQ ID NO: 25 |
| KO | | NCmic1 F | CCGAGCAAGTTAG | | CATGFP R | CCGTTTGGTGTGG |
| 5′Ncmic1 | | | CAAGTTAGCAAGT | | | ATGTCTCTCTC |
| (mix6) | | | CC | | | |
| Validation | k | ORF | SEQ ID NO: 26 | n | Integ | SEQ ID NO: 29 |
| KO | | CATGFP F | GCATCGACTTCAA | | NCmic1 R | CTTGTGTCCGTCA |
| 3′Ncmic1 | | | GGAGGAGGAC | | | CATCGTTTG |
| (mix7) | | | | | | |
| Scar | e | ncmic1creLox | SEQ ID NO: 30 | f | ncmic1creLox | SEQ ID NO: 31 |
| Ncmic1 | | F B B | GGCGACATACTGC | | R B B | GATCGGAGTCTCT |
| (mix8) | | | ATTGGAT | | | GTCCCTCAA |

TABLE 4
Expected amplicon size (in base pairs) of the different
PCRs for validation of the construction of KO
strains of Neospora caninum

| | | Neo | Neo | Neo | Neo |
|---|---|---|---|---|---|
| | | ncmic3 | ncmic3 | ncmic1-3 | ncmic1-3 |
| | NC-1 | KO | KO LoxN | KO LoxP | KO 2G |
| Ncmic3 (mix1) | 850 | — | — | — | — |
| Validation KO | — | 2960 | — | — | — |
| 5′Ncmic3 (mix2) | | | | | |
| Validation KO | — | 3668 | — | — | — |
| 3′Ncmic3 (mix3) | | | | | |
| Scar Ncmic3 (mix4) | 2163 | 2575 | 276 | 276 | 276 |
| Ncmic1 (mix5) | 701 | 701 | 701 | — | — |
| Validation KO | — | — | — | 3359 | — |
| 5′Ncmic1 (mix6) | | | | | |
| Validation KO | — | — | — | 3421 | — |
| 3′Ncmic1 (mix7) | | | | | |
| Scar Ncmic1 (mix8) | 3161 | 3161 | 3161 | 2560 | 261 |

[0608] The electrophoresis of the PCR products performed with the primers c SEQ ID NO: 22 and d SEQ ID NO: 23 (mix 1) allow to highlight a band with 850 base pairs for the NC-1 strain, in accordance with the expected band size and confirming the presence of the ncmic3 gene SEQ ID NO: 105 in this strain. This band is not detected in the strains Neo ncmic3 KO, Neo ncmic3 KO-2G, Neo ncmic1-3 KO and Neo ncmic1-3 KO-2G confirming the suppression of the gene in these strains.

[0609] The electrophoresis of the PCR products carried out with the primers i SEQ ID NO: 24 and j SEQ ID NO: 25 and the primers k SEQ ID NO: 26 and SEQ ID NO: 27 (mix Ncmic3) allow to highlight respectively a band at 2960 and 3668 base pairs for the Neo ncmic3 KO strain, according to the expected band size and confirming the presence of the cat-gfp selection gene in this strain instead of the ncmic3 gene. This band is not detected in NC-1, Neo ncmic3 KO-2G, Neo ncmic1-3 KO and Neo ncmic1-3 KO-2G strains confirming the absence of the cat-gfp selection gene SEQ ID NO: 2 at the ncmic 3 locus in these strains.

[0610] The electrophoresis of the PCR products made with the primers g SEQ ID NO: 32 and h SEQ ID NO: 33 (Ncmic3 scar) allow to highlight different bands according to the expected band size. A band with 2163 base pairs for the NC-1 strain confirms the presence of the ncmic3 gene SEQ ID NO: 105 in this strain. A tape of 2575 base pairs is highlighted for the Neo ncmic3 KO strain confirming the presence of the CATGFP selection cassette SEQ ID NO: 6 in place of the ncmic3 gene. Finally, a band of 276 base pairs is highlighted for the strains Neo ncmic3 KO-2G Neo ncmic1-3 KO and Neo ncmic1-3 KO-2G confirming the deletion of the cat-gfp selection gene SEQ ID NO: 2 in these strains, leaving a LoxN scar SEQ ID NO: 5 in the genome.

[0611] The electrophoresis of the PCR products carried out with the primers a SEQ ID NO: 20 and b SEQ ID NO: 21 (mix Ncmic1) allow to highlight a band with 644 base pairs for the strains NC-1, Neo ncmic3 KO, Neo ncmic3 KO-2G, according to the expected band sizes and confirming the presence of the gene ncmic1 SEQ ID NO: 106 in these strains. These bands are not detected in the strains Neo ncmic1-3 KO and Neo ncmic1-3 KO-2G confirming the suppression of the gene in these strains.

[0612] The electrophoresis of the PCR products carried out with the primers m SEQ ID NO: 28 and j SEQ ID NO: 25 and the primers k SEQ ID NO: 26 and n SEQ ID NO: 29 (mix Ncmic1) allow to highlight respectively a band at 3359 and 3421 base pairs for the Neo ncmic1-3 KO strain, according to the expected band size and confirming the presence of the cat-gfp selection gene SEQ ID NO: 2 in this strain instead of the ncmic1 gene. This band is not detected in the wild NC-1 strains of N. caninum, Neo ncmic3 KO, Neo ncmic3 KO-2G, and Neo ncmic1-3 KO-2G confirming the absence of the at-gfp selection gene SEQ ID NO: 2 at locus ncmic 1 in these strains.

[0613] The electrophoresis of the PCR products made with the primers SEQ ID NO: 30 and f SEQ ID NO: 31 (scar Ncmic1) allow to highlight different bands according to the expected band size. A band of 2182 base pairs for the strains NC-1, Neo ncmic3 KO, Neo ncmic3 KO-2G confirms the presence of the ncmic1 gene in these strains. A tape of 2560 base pairs is highlighted for the Neo ncmic1-3 KO strain confirming the presence of the CATGFP selection cassette SEQ ID NO: 6 in place of the ncmic1 gene. Finally, a band of 261 base pairs is highlighted for the Neo ncmic1-3 KO-2G strain confirming the deletion of the cat-gfp selection gene SEQ ID NO: 2 in this strain, leaving a LoxP scar SEQ ID NO: 12 in the genome.

[0614] The “scar” PCR products (mix 4 and 8) were sequenced and the sequencing confirmed that:
[0615] the ncmic3 gene SEQ ID NO: 105 has been deleted and that the CAT-GFP selection cassette SEQ ID NO: 6 has been deleted by the action of the Cre-Recombinase leaving a LoxN scar SEQ ID NO: 5 in accordance with the expected sequence (FIG. 3C).
[0616] the ncmic1 gene SEQ ID NO: 106 has been deleted and that the CAT-GFP selection cassette SEQ ID NO: 6 has been deleted by the action of the Cre-Recombinase leaving a LoxP scar SEQ ID NO: 12 in accordance with the expected sequence (FIG. 3C).

[0617] Validation of the Neo Ncmic1-3 KO-2G Strain by Immunofluorescence

[0618] Tachyzoites grown 24 hours on glass lamellae covered with a monolayer of HFF cells. The infected cells were washed twice with PBS1×, and fixed with 4% formaldehyde for 30 minutes. After 3 washes in PBS1×, the infected HFF cells were permeabilized with 0.1% Triton X-100 in PBS1× for 5 min. After 3 washes with PBS 1×, a saturation step is performed with a solution of PBS 1×/SVF 10% for 30 min. The cells were then incubated with the primary antibody diluted in 2% SVF for 1 hour, washed 3 times with PBS1× and incubated with a secondary antibody diluted in 2% PBS/SVF solution for 1 hour. After 2 washes with PBS1×, the glass slides are mounted on a slide with Immu-Mount™ and observed under a fluorescence microscope.

[0619] The primary antibody Tgmic3 allows a recognition of the protein Ncmic3, it allows to detect the expression of the protein NcMIC3 SEQ ID NO: 118 in the parasite (rabbit antibody anti-mic3: rnAb anti-MIC3 s3) and the commercial secondary antibody used is Alexa Fluor® 594 goat anti rabbit (Life technologies ref. A-11012).

[0620] The results show that no fluorescence is detectable at the apical pole of the parasite, indicating the absence of MIC3 proteins (FIG. 4-A).

[0621] The primary antibody Tgmic 1 does not allow recognition of the NcMIC1 protein SEQ ID NO: 119.

[0622] The results show that the parasites express a green fluorescent reflecting the expression of the CATGFP protein SEQ ID NO: 120 following the realization of gene deletions (Neo ncmic3 KO and Neo ncmic1-3 KO) while after the action of recombinase Cre, the Neo ncmic3 KO-2G and Neo ncmic1-3 KO-2G strains are no longer fluorescent (removal of the CATGFP cassette SEQ ID NO: 6) (FIG. 4-B).

### EXAMPLE 2: CONSTRUCTION OF THE TOXO TGMIC1-3 KO-2G STRAIN

[0623] Haploidy of the Toxoplasma gondii genome during the proliferative phase allows the invalidation of a gene into a single homologous recombination.

[0624] Cultivation of Parasites

[0625] All tachyzoites of the Toxoplasma gondii strain used were produced in human fibroblasts (HFF Hs27 ATCC CRL-1634) grown in a minimal Dulbecco medium (DMEM) supplemented with 10% fetal calf serum (SVF), 2 mM glutamine, 100 U/mL penicillin and 100 U/mL streptomycin. They were collected after mechanical lysis of the host cells by 3 passages in 25G syringes.

[0626] Plasmid Construction

[0627] Plasmid pTgMIC3-KO-CAT-GFP LoxP

[0628] The plasmid pTgMIC3-KO-CAT-GFP LoxP of SEQ ID NO: 34 (FIG. 5A) was constructed to remove the gene encoding the TgMIC3 protein from Toxoplasma gondii (ATCC reference: RH Pra310 strain) by homologous recombination.

[0629] The plasmid pTgMic3KO-CAT-GFP LoxP of SEQ ID NO: 34 contains a CAT-GFP selection cassette SEQ ID NO: 6 comprising a cat-gfp selection gene SEQ ID NO: 2 encoding a CAT-GFP fusion protein allowing both chloramphenicol (CAT) resistance and green fluorescence (GFP: Green Fluorescent Protein), under the control of the promoter of α-tubulin of Toxoplasma gondii SEQ ID NO: 3. Downstream of the cat-gfp gene SEQ ID NO: 2, the sequence 3′ UTR of the sag1 gene of Toxoplasma gondii SEQ ID NO: 4 is inserted. SEQ ID NO: 6 was amplified from the plasmid pT230 CAT-GFP SEQ ID NO: 9 using the primers SEQ ID NO: 35 and SEQ ID NO: 36 which allow the addition of LoxP sites (SEQ ID NO: 12) and HindIII and SpeI restriction sites. The nucleotide sequence amplified by PCR (2389 bp) was then cloned in the plasmid pT230TUB Ble SEQ ID NO: 37 by enzymatic digestion with the restriction enzymes HindIII and SpeI. The plasmid obtained is called pCATGFP LoxP of SEQ ID NO: 38.

[0630] The 3′ HR region of the tgmic3 gene SEQ ID NO: 39 was obtained by the double enzymatic digestion of the plasmid pmic3KO-2 SEQ ID NO: 40 with the restriction enzymes KpnI and HindIII (2145pb), then cloned in the plasmid pCATGFP LoxP of SEQ ID NO: 38 digested by KpnI and HindIII (5238pb). The plasmid obtained is called p3′ UTRmic3-CATGFP LoxP of SEQ ID NO: 41.

[0631] The 5′HR region of the tgmic3 gene SEQ ID NO: 42 was amplified by PCR from the genomic DNA of the RH strain of T. gondii. For amplification, the primers SEQ ID NO: 43 and SEQ ID NO: 44 allow the amplification of the 5′ UTR region of the tgmic3 gene and the creation of two restriction sites (2568pb/SpeI and XbaI sites). These restriction sites were used to clone the 5HR fragment digested by SpeI and XbaI (2548pb) into the plasmid p3′ UTRmic3-CATGFP LoxP of SEQ ID NO: 38 downstream of the CAT-GFP selection cassette SEQ ID NO: 6 at the SpeI site of the plasmid previously described (7383pb) to obtain the plasmid pTgMic3KO-CAT-GFP LoxP of SEQ ID NO: 34.

[0632] The sequences of the primers are shown in Table 5 below.

TABLE 5
Sequences of primers used for the construction of
the plasmid pTgMIC3-KO-CAT- GFP LoxP.
Construction of the plasmid pTgmic3KO CAT-GFP LoxP

| | | |
|---|---|---|
| SEQ ID NO: 35 | GCGGCCAAGCTTATAACTTCGTA | HindIII, |
| | TAATGTATGCTATACGAAGTTAT | loxP |
| | GATATGCATGTCCGCgttcgtga | |
| | aatctctgatcaagcgg | |
| SEQ ID NO: 36 | cgacgcacgctgtcactcaactt | SpeI, BamHI, |
| | gctGCTAGAACTAGTGGATCCAT | loxP |
| | AACTTCGTATAGCATACATTATA | |
| | CGAAGTTATCCCTCGG | |
| SEQ ID NO: 43 | GGGATCCACTAGTTTACGTATCG | BamHI, SpeI, |
| | CGACTAGCAGCAAGTTGAGTGAC | SnaBI, NruI |
| | AGCG | |
| SEQ ID NO: 44 | GCTGCAGTCTAGAGATATCCACG | PstI, XbaI, |
| | TGGAATTCCTCTTGGGAAGAACA | EcoRV PmlI |
| | AT | |

[0633] Plasmid pTgMIC1-KO-CAT-GFP LoxN

[0634] The plasmid pTgMIC1-KO-CAT-GFP LoxN of SEQ ID NO: 45 (FIG. 5-B) was constructed to remove the gene encoding the TgMIC1 protein from Toxoplasma gondii by homologous recombination.

[0635] The plasmid pTgMic1KO-CAT-GFP LoxN of SEQ ID NO: 45 contains a CAT-GFP selection cassette SEQ ID NO: 6 comprising the cat-gfp selection gene SEQ ID NO: 2 encoding the fusion protein CAT-GFP allowing both chloramphenicol (CAT) resistance and green fluorescence (GFP: Green Fluorescent Protein), under the control of the Toxoplasma gondii promoter α-tubulin SEQ ID NO: 3. Downstream of the cat-gfp gene SEQ ID NO: 2, the sequence 3′ UTR of the sag1 gene of Toxoplasma gondii SEQ ID NO: 4 was inserted. SEQ ID NO: 6 was amplified from the plasmid pT230 CAT-GFP SEQ ID NO: 9 using the primers SEQ ID NO: 46 and SEQ ID NO: 47 which allow the addition of LoxN sites (SEQ ID NO: 5) and ClaI and XbaI restriction sites. The nucleotide sequence amplified by PCR was then cloned in the plasmid pNcMic3KO-DHFR SEQ ID NO: 10 digested by ClaI and XbaI (7715 bp) by enzymatic digestion with the restriction enzymes ClaI and XbaI. The plasmid obtained is called pNCmic3KO CATGFP LoxN of SEQ ID NO: 48.

[0636] The 5HR tgmic1 fragment SEQ ID NO: 49 was amplified by PCR with the primers SEQ ID NO: 50 and SEQ ID NO: 51 (2364pb), the restriction sites KpnI and ClaI were added by PCR. The amplified fragment is digested by the restriction enzymes KpnI and ClaI (2337pb) and cloned in the plasmid pNCmic3KO CATGFP LoxN of SEQ ID NO: 48 (see example 1 for obtaining the plasmid pNCmic3KO CATGFP LoxN) digested by KpnI and ClaI (7740pb) to replace the 5HR ncmic3 fragment (fragment digested by KpnI and ClaI). The plasmid obtained is called pTgmic1KO5HR-NCmic3KO3KO3HR CATGFP LoxN of SEQ ID NO: 111.

[0637] Then the 3HR tgmic1 fragment SEQ ID NO: 52 was amplified by PCR with the primers SEQ ID NO: 53 and SEQ ID NO: 54 (2750pb), the restriction sites XbaI and NotI were added by PCR. The amplified fragment is digested by the restriction enzymes XbaI and NotI (2720 bp) and then cloned in the plasmid pTgmic1KO5HR-NCmic3KO3KO3HR CATGFP LoxN of SEQ ID NO: 111 digested by the restriction enzymes XbaI and NotI (7565 bp) to replace the 3HR ncmic3 fragment (fragment digested by XbaI and NotI). The plasmid obtained is called pTgmic1KO CAT-GFP LoxN of SEQ ID NO: 45.

[0638] The primers used for PCRs are detailed in Table 6 below.

TABLE 6
Primers for the construction of the plasmid
pTgmic3KO CAT-GFP LoxP
Construction of the plasmid pTgmic3KO CAT-GFP LoxP

| | | | |
|---|---|---|---|
| SEQ ID NO: 46 | TCCGCTCTCAGAGAATCGAT | ClaI | |
| | GAAGCTTATAACTTCGTATA | LoxN | |
| | GTATACCTTATACGAAGTTA | | |
| | TGATATGCATGTCCGCGTTC | | |
| | GTGAAATCTC | | |
| SEQ ID NO: 47 | ATACGTAAACTTCTAGATCC | XbaI | |
| | ATAACTTCGTATAAGGTATA | loxN | |
| | CTATACGAAGTTATCCCTCG | | |
| | GGGGGGCAAGAATTGTGTTA | | |
| | ACCGGTTCGA | | |
| SEQ ID NO: 50 | GTAGCAAGGTACCACAAGCT | | 5HR |
| | AAAGAAAGTAGTGCCTCTTC | | tgmic1For |
| | TAAA | | KpnI |
| SEQ ID NO: 51 | TAAACGGGCTGATCGATGCA | | 5HR |
| | GGTAAATTCTATAGCCGGGT | | tgmic1 |
| | | | Rev ClaI |
| SEQ ID NO: 53 | TAAACGGGCTGATCGATGCA | | 3HR |
| | GGTAAATTCTATAGCCGGGT | | tgmic1For |
| | | | XbaI |
| SEQ ID NO: 54 | AAAAACTCGGTGGCGGCCGC | | 3HR |
| | ATAAAGAAGAGCAAGGAAAA | | tgmic1rev |
| | | | NotI |

[0639] Plasmid pTSAG1-Cre Recombinase

[0640] The plasmid pT-SAG1-Cre-Recombinase SEQ ID NO: 15 was constructed to transiently express in the parasite Toxoplasma gondii and its genetically modified derivatives the gene encoding the Cre Recombinase protein derived from bacteriophage P1 (Brecht et al., 1999, same reference as above).

[0641] The plasmid pT-SAG1-Cre-Recombinase SEQ ID NO: 15 is derived from the plasmid pUC18 (commercial plasmid) which contains an expression cassette of the Cre Recombinase of bacteriophage P1. In the plasmid pT-SAG1-Cre-Recombinase SEQ ID NO: 15, the gene encoding the Cre Recombinase SEQ ID NO: 16, is placed under the dependence of the promoter of the sag1 gene of Toxoplasma gondii SEQ ID NO: 17, which allows the expression of the Cre Recombinase protein in transfected Toxoplasma gondii parasites. Downstream of the gene encoding the Cre Recombinase SEQ ID NO: 16, the 3′ UTR sequence of the sag1 gene of Toxoplasma gondii SEQ ID NO: 4 is inserted. The objective of this sequence is to stabilize the mRNA encoding the Cre Recombinase protein. The absence of a specific selection cassette does not allow a stable integration of the transfected genetic material but only a transient expression of Cre Recombinase.

[0642] Construction of the Toxo Tgmic1-3 KO-2G Strain

[0643] The construction of the second generation attenuated live strain, called Toxo tgmic1-3 KO-2G, is done in 4 distinct steps (FIG. 6-A):
[0644] 1. Deletion by homologous recombination of the tgmic3 gene and its replacement by the CAT-GFP selection cassette SEQ ID NO: 6 framed by LoxP sequences SEQ ID NO: 12.
   [0645] To obtain this strain, the wild strain of Toxoplasma gondii RH (reference ATCC: PRA-310) is electroporated with the plasmid pTgMIC3-KO-CAT-GFP LoxP SEQ ID NO: 34. 20 μg of plasmid purified and linearized by KpnI are added to 10⁷ parasites suspended in the CYTOMIX electroporation medium containing ATP (3 mM) and Glutathione (3 mM) (Van den Hoff et al, Nucleic Acid Research, June 11; 20(11):2902), and electroporation was performed in a 4 mm gap cell, in a volume of 800 μL on a BioRad device (Parameters: 2000V, 50 ohms, 25 μF, with two electric shocks). After electroporation, the tachyzoites are deposited on a monolayer of HFF cells in culture. For mutant selection, the culture medium is replaced and supplemented by the selection agent (chloramphenicol 20 μM) 24 hours after electroporation. 10 to 15 days after selection, the parasites are subcloned in 96-well plate on a monolayer of HFF cells and the clones of interest are identified by PCR after performing DNA genomic DNA extraction from the clones of interest. The strain obtained is called Toxo tgmic3 KO.
   [0646] In this strain, the mic3 gene has been deleted and replaced by the CATGFP selection cassette SEQ ID NO: 6. Thus, the theoretical sequence at the locus of the deleted mic3 gene containing the CATGFP selection cassette is SEQ ID NO: 103. Since the mic1 gene is not deleted, the sequence of the mic1 gene SEQ ID NO: 108 is present in the genome of the strain.
[0647] 2. Deletion of the selection cassette SEQ ID NO: 6: the Toxo tgmic3 KO strain obtained is electroporated with the plasmid pT-SAG1-CRE-Recombinase SEQ ID NO: 15.
   [0648] The transiently expressed enzyme will allow the excision of the CAT-GFP selection cassette SEQ ID NO: 6. The electroporation protocol is similar to the previous one. After electroporation, the tachyzoites are deposited on a monolayer of HFF cells in culture. After 2 to 7 days of culture, the parasites are subcloned in 96-well plate on a monolayer of HFF cells and the clones of interest are identified by PCR after performing DNA genomic DNA extraction from the clones of interest. The strain obtained is called Toxo tgmic3 KO-2G.
[0649] 3. In this strain, the mic3 gene was deleted and the CATGFP selection cassette SEQ ID NO: 6 was excised. Thus, the theoretical sequence at the locus of the deleted mic3 gene containing a single LoxP site SEQ ID NO: 12, is SEQ ID NO: 19. since the mic1 gene is not deleted, the sequence of the mic1 gene SEQ ID NO: 108 is present in the genome of the strain. Deletion by homologous recombination of the tgmic1 gene and its replacement by the CAT-GFP selection cassette SEQ ID NO: 6 framed by LoxN sequences SEQ ID NO: 5. To obtain this strain, the Toxo tgmic3 KO-2G strain is electroporated with the plasmid pTgMIC1-KO-CAT-GFP LoxN of SEQ ID NO: 45 linearized by PciI, according to the protocol previously described. After electroporation, the tachyzoites are deposited on a monolayer of HFF cells in culture. For mutant selection, the culture medium is replaced and supplemented by the selection agent (chloramphenicol 20 μM) 24 hours after electroporation. 10 to 15 days after selection, the parasites are subcloned in 96-well plate on a monolayer of HFF cells and the clones of interest are identified by PCR after performing genomic DNA extraction from the clones of interest. The strain obtained is called Toxo tgmic1-3 KO.
[0650] 4. In this strain, the mic3 gene was deleted and the CATGFP selection cassette SEQ ID NO: 6 was excised. Thus, the theoretical sequence at the locus of the deleted mic3 gene containing a single LoxP site SEQ ID NO: 12, is SEQ ID NO: 19.
   [0651] In this strain, the mic1 gene has been deleted and replaced by the CATGFP selection cassette SEQ ID NO: 6. Thus, the theoretical sequence at the locus of the deleted mic1 gene containing the CATGFP selection cassette is SEQ ID NO: 104.
[0652] 5. Deletion of the selection cassette SEQ ID NO: 6: the Toxo tgmic1-3 KO strain obtained is electroporated with the plasmid pT-SAG1-CRE-Recombinase SEQ ID NO: 15. The transiently expressed enzyme will allow the excision of the CAT-GFP selection cassette SEQ ID NO: 6. After electroporation, the tachyzoites are deposited on a monolayer of HFF cells in culture. After 2 to 7 days of culture, the parasites are subcloned in 96-well plate on a monolayer of HFF cells and the clones of interest are identified by PCR after performing DNA genomic DNA extraction from the clones of interest. The strain obtained is called Toxo tgmic1-3 KO-2G.
   [0653] In this strain, the mic3 gene was deleted and the CATGFP selection cassette SEQ ID NO: 6 was excised. Thus, the theoretical sequence at the locus of the deleted mic3 gene containing a single LoxP site SEQ ID NO: 12, is SEQ ID NO: 19.
   [0654] In this strain, the mic1 gene was deleted and the CATGFP selection cassette SEQ ID NO: 6 was excised. Thus, the theoretical sequence at the locus of the deleted mic1 gene containing a single LoxN site SEQ ID NO: 5, is SEQ ID NO: 92.

[0655] Validation of the Toxo Tgmic1-3 KO-2G Strain by PCR

[0656] To validate the Toxo tgmic1-3 KO-2G strain, PCR analyses are carried out using genomic DNA extracted with DNAzol from a parasitic pellet composed of 10⁷ parasites. The primers used for PCR are described in FIG. 11-B and detailed in Table 7 below. PCR products are analyzed by agarose gel electrophoresis (FIG. 6-B). Their expected and observed sizes are also described in Table 8 below. For greater clarity in FIG. 6-B, only the 3 steps of the realization are represented (tgmic3, tgmic3KO CATGFP and tgmic3KO LoxP (2G) or tgmic1, tgmic1KO CATGFP and tgmic1KO LoxN (2G)), the results obtained are in accordance with the expected sizes.

TABLE 7
List of primers used for strain validation.

| | | | | | | |
|---|---|---|---|---|---|---|
| Tgmic3 | 5 | TgMIC3 | SEQ ID NO 61: | 6 | TgMIC3 | SEQ ID NO 62: |
| (mix1) | | For | CCTCCGATGTGTGA | | Rev | GATCCTCCGAGCA |
| | | | CTTTTGGT | | | AGTCAAGTCAAC |
| Validation | 13 | CN58 | SEQ ID NO. 63: | j | ORF | SEQ ID NO 25: |
| KO | | | ATACGAAGGGATTC | | CATGF | CCGTTTGGTGGAT |
| 5′Tgmic3 | | | GACGTG | | PR | GTGTCTCTCT |
| (mix2) | | | | | | |
| Validation | k | ORF | SEQ ID NO. 26: | 14 | HR | SEQ ID NO 64 |
| KO | | CATGFP | GCATCGACTTCAAG | | Mic3 | ATATGCGGATGAG |
| 3′Tgmic3 | | F | GAGGAGGAC | | RL | GAGTGAGTGCTCG |
| (mix3) | | | | | | AATT |
| Scar | 9 | Tgmic3 | SEQ ID NO 65: | 10 | Tgmic3 | SEQ ID NO. 66: |
| Tgmic3 | | LoxN F | GTGTGGAGACTACT | | LoxN R | CCTCCGATGTGAC |
| (mix4) | | | TTTTTACTTCGTTA | | | TTTTGGT |
| | | | C | | | |
| Tgmic1 | 3 | TgMIC1 | SEQ ID NO 55: | 4 | TgMIC1 | SEQ ID NO 56: |
| (mix5) | | For | ATGCGCGCGCTATA | | Rev | AGAAACAACGCCT |
| | | | AAAGAATCG | | | GGCCCAT |
| Validation | 11 | tgmic1K | SEQ ID NO. 57: | j | ORF | SEQ ID NO 25: |
| KO | | O integ | GTGCGATGACGTGA | | CATGF | CCGTTTGGTGGAT |
| 5′Tgmic1 | | F | CGTGGGGCTTCTCT | | P R | GTGTCTCTCT |
| (mix6) | | | ATCATCATGTGTGT | | | |
| Validation | k | ORF | SEQ ID NO. 26: | 12 | tgmic1K | SEQ ID NO. 58: |
| KO | | CATGFP | GCATCGACTTCAAG | | O integ | GATTCGCTTCGTC |
| 3′Tgmic1 | | F | GAGGAGGAC | | R | AGTCACTTCTGGG |
| (mix7) | | | | | | GTACGGATGC |
| Scar | 7 | Tgmic1 | SEQ ID NO 59: | 8 | Tgmic1 | SEQ ID NO 60: |
| Tgmic1 | | LoxN F | CCCGTCTAGCAAGA | | LoxN R | TCGGTGCTGCTGC |
| (mix8) | | | CACCTCAAA | | | TCAGTAATTG |

TABLE 8
Expected amplicon size (in base pairs) of the different
PCRs for validation of the construction of KO
strains of Toxoplasma gondii

| | | Toxo | Toxo | Toxo | Toxo |
|---|---|---|---|---|---|
| | | tgmic3 | tgmic3 | tgmic1-3 | tgmic1-3 |
| | HR | KO | KO - 2G | KO | KO - 2G |
| Tgmic3 (mix1) | 808 | — | — | — | — |
| Validation KO | — | 3253 | — | — | — |
| 5′Tgmic3 (mix2) | | | | | |
| Validation KO | — | 3309 | — | — | — |
| 3′Tgmic3 (mix3) | | | | | |
| Scar Tgmic3 (mix4) | 1596 | 2525 | 226 | 226 | 226 |
| Tgmic1 (mix5) | 608 | 608 | 608 | — | — |
| Validation KO | — | — | — | 3040 | — |
| 5′Tgmic1 (mix6) | | | | | |
| Validation KO | — | — | — | 3593 | — |
| 3′Tgmic1 (mix7) | | | | | |
| Scar Tgmic1 (mix8) | 4198 | 4198 | 4198 | 3129 | 830 |

[0657] The electrophoresis of the PCR products produced with primers 5 SEQ ID NO: 61 and 6 SEQ ID NO: 62 (mix 1) allow to highlight a band with 808 base pairs for the RH strain, in accordance with the expected band size and confirming the presence of the tgmic3 gene in this strain. This band is not detected in Toxo tgmic3 KO, Toxo tgmic3 KO-2G, Toxo tgmic1-3 KO and Toxo tgmic1-3 KO-2G strains confirming gene suppression in these strains.

[0658] The electrophoresis of the PCR products made with the primers 13 SEQ ID NO: 63 and j SEQ ID NO: 25, and the primers k SEQ ID NO: 26 and 14 SEQ ID NO: 64 (mix 2 and 3) allow to highlight respectively a band at 3253 and 3537 base pairs for the Toxo tgmic3 KO strain, in accordance with the expected band size and confirming the presence of the cat-gfp selection gene SEQ ID NO: 2 in this strain instead of the tgmic3 gene SEQ ID NO: 107. This band is not detected in RH strains, Toxo tgmic3 KO-2G, Toxo tgmic1-3 KO and Toxo tgmic1-3 KO-2G confirming the absence of the cat-gfp selection gene SEQ ID NO: 2 at Tgmic 3 in these strains.

[0659] The electrophoresis of the PCR products made with the primers 9 SEQ ID NO: 65 and 10 SEQ ID NO: 66 (mix 4) allow to highlight different bands according to the expected band size. A band with 1596 base pairs for the RH strain confirms the presence of the tgmic3 gene SEQ ID NO: 107 in this strain. A tape of 2525 base pairs is highlighted for the Toxo tgmic3 KO strain confirming the presence of the CATGFP selection cassette SEQ ID NO: 6 in place of the tgmic3 gene. Finally, a band of 226 base pairs is highlighted for the strains Toxo tgmic3 KO-2G, Toxo tgmic1-3 KO and Toxo tgmic1-3 KO-2G confirming the deletion of the cat-gfp selection gene SEQ ID NO: 2 in these strains, leaving a LoxP scar SEQ ID NO: 12 in the genome.

[0660] The electrophoresis of the PCR products produced with primers 3 SEQ ID NO: 55 and 4 SEQ ID NO: 56 (mix 5) allow to highlight a band with 608 base pairs for the RH, Toxo tgmic3 KO and Toxo tgmic3 KO-2G strains, according to the expected band sizes and confirming the presence of the tgmic1 gene SEQ ID NO: 108 in these strains. These bands are not detected in Toxo tgmic1-3 KO and Toxo tgmic1-3 KO-2G strains confirming the suppression of the gene in these strains.

[0661] The electrophoresis of the PCR products made with primers 11 SEQ ID NO: 57 and j SEQ ID NO: 25, and primers k SEQ ID NO: 26 and 12 SEQ ID NO: 58 (mix 6 and 7) allow to highlight respectively a 3040 and 3593 base pairs band for the Toxo tgmic1-3 KO strain, in accordance with the expected band size and confirming the presence of the cat-gfp selection gene SEQ ID NO: 2 in this strain instead of the tgmic3 gene SEQ ID NO: 107. This band is not detected in the wild RH strains of T. gondii (ATCC reference: PRA-310), Toxo tgmic3 KO, Toxo tgmic3 KO-2G, and Toxo tgmic1-3 KO-2G confirming the absence of the cat-gfp SEQ ID NO: 2 selection gene at the Tgmic1 locus in these strains.

[0662] The electrophoresis of the PCR products made with primers 7 SEQ ID NO: 59 and 8 SEQ ID NO: 60 (mix 8) allow to highlight different bands according to the expected band size. A band of 4198 base pairs for the RH, Toxo tgmic3 KO and Toxo tgmic3 KO-2G strains confirms the presence of the tgmic1 gene SEQ ID NO: 108 in these strains. A tape of 3129 base pairs is highlighted for the Toxo tgmic1-3 KO strain confirming the presence of the CATGFP selection cassette SEQ ID NO: 6 in place of the tgmic1 gene. Finally, a band of 830 base pairs is highlighted for the Toxo tgmic1-3 KO-2G strain confirming the deletion of the cat-gfp selection gene SEQ ID NO: 2 in this strain, leaving a LoxN scar SEQ ID NO: 5 in the genome.

[0663] The “scar” PCR products (mix 4 and 8) were sequenced and the sequencing confirmed that:
[0664] the tgmic3 gene SEQ ID NO: 107 has been deleted and that the CAT-GFP selection cassette SEQ ID NO: 6 has been deleted by the action of Cre-Recombinase leaving a LoxP scar SEQ ID NO: 12 in accordance with the expected sequence (FIG. 6-C).
[0665] the tgmic1 gene SEQ ID NO: 108 has been deleted and that the CAT-GFP selection cassette SEQ ID NO: 6 has been deleted by action of the CRE-Recombinase leaving a LoxN scar SEQ ID NO: 5 in accordance with the expected sequence (FIG. 6-C).

[0666] Validation of the Toxo Tgmic1-3 KO-2G Strain by Immunofluorescence

[0667] Tachyzoites are grown 24 hours on glass lamellae covered with a monolayer of HFF cells. The infected cells were washed twice with PBS1×, and fixed with 4% formaldehyde for 30 minutes. After 3 washes in PBS1×, the infected HFF cells were permeabilized with 0.1% Triton X-100 in PBS1× for 5 min. After 3 washes with PBS 1×, a saturation step is performed with a solution of PBS 1×/SVF 10% for 30 min. The cells were then incubated with the primary antibody diluted in 2% SVF for 1 hour, washed 3 times with PBS1× and incubated with a secondary antibody diluted in 2% PBS/SVF solution for 1 hour. After 2 washes with PBS1×, the glass slides are mounted on a slide with Immu-Mount™ and observed under a fluorescence microscope.

[0668] The primary antibody Tgmic3 used is an antibody that detects the expression of the protein TgMIC3 SEQ ID NO: 121 in the parasite (rabbit anti-mic3 antibody: rnAb anti-MIC3 s3) and the secondary commercial antibody used is Alexa Fluor® 594 goat anti rabbit (Life technologies ref. A-11012).

[0669] The primary antibody Tgmic1 used is an antibody that detects the expression of the protein TgMIC1 SEQ ID NO: 122 in the parasite (mouse anti-mic 1 antibody: mAb anti-MIC1 T104F8E12) and the secondary commercial antibody used is Alexa Fluor® 594 goat anti-mouse, Life technologies ref. A-11005).

[0670] The results show that no fluorescence is detectable at the apical pole of the parasite revealing the absence of MIC1 and MIC3 proteins in tachyzoites Toxo tgmic1-3 KO-2G while fluorescence at the apical pole of the parasite of the wild strain demonstrates the expression of MIC1 and MIC3 proteins (FIG. 7).

[0671] The results show that the parasites express a green fluorescent reflecting the expression of the CATGFP protein SEQ ID NO: 120 following the completion of gene deletions (Toxo tgmic3 KO and Toxo tgmic1-3 KO) while after the action of Cre recombinase, the Toxo tgmic3 KO-2G and Toxo tgmic1-3 KO-2G strains are no longer fluorescent (CATGFP cassette removal) (FIG. 7).

### EXAMPLE 3: CONSTRUCTION OF THE TOXO TGMIC1-3 KO ROP16 KO GRA15II KI STRAIN

[0672] Material and Method

[0673] Haploidy of the Toxoplasma gondii genome during the proliferative phase allows the invalidation of a gene into a single homologous recombination.

[0674] Cultivation of Parasites

[0675] All tachyzoites of the Toxoplasma gondii strain used were produced as human fibroblasts (HFF) grown in minimal Dulbecco medium (DMEM) supplemented with 10% fetal calf serum (SVF), 2 mM glutamine, 100 U/mL penicillin and 100 U/mL streptomycin. They were collected after mechanical lysis of the host cells by 3 passages in 25G syringes.

[0676] Plasmid Construction

[0677] The plasmid pTgRop16KO-Gra15IIKI-CAT-GFP Lox2272 of SEQ ID NO: 67 (FIG. 8) contains the CAT-GFP selection cassette SEQ ID NO: 6 comprising the cat-gfp selection gene SEQ ID NO: 2, encoding the fusion protein CAT-GFP conferring chloramphenicol resistance (CAT) and green fluorescence (GFP), under the control of the promoter of α-tubulin of Toxoplasma gondii SEQ ID NO: 3 to allow gene expression in the parasite. Downstream of the selection gene SEQ ID NO: 2, the sequence 3′ UTR of the sag1 gene of Toxoplasma gondii SEQ ID NO: 4 is inserted. The objective of this sequence is to stabilize the mRNA encoding the CAT-GFP fusion protein.

[0678] The selection cassette SEQ ID NO: 6 is framed by two Lox2272 sites SEQ ID NO: 68, recognition sites specifically recognized by the Cre Recombinase and which will later be used to delete the CAT-GFP selection cassette.

[0679] Downstream of the second Lox2272 site, an expression cassette of the gra15II gene SEQ ID NO: 69 was cloned. This expression cassette consists of the gra15II promoter amplified from the genomic DNA of the ME49 strain and the gra15II gene SEQ ID NO: 70 amplified from the genomic DNA of the ME49 strain, including an HA tag in 3′ SEQ ID NO: 72 to facilitate the location and the 3′ UTR sequence of the sag1 gene of T. gondii SEQ ID NO: 4 amplified from the genomic DNA of the RH strain. This plasmid therefore allows the simultaneous realization of a rop16KO Lox2272 CATGFP Lox2272 mutant and the insertion of gra15IIHA at the rop16 locus.

[0680] The plasmid pTgROP16-KO-CAT-tdTomato SEQ ID NO: 73 contains a CAT-tdTomato cassette SEQ ID NO: 125—framed by a 5′ HR sequence of the tgrop16 gene SEQ ID NO: 99 and a 3′ HR sequence of the tgrop16 gene SEQ ID NO: 100.

[0681] Cloning was done from the plasmid pTgROP16-KO-CAT-tdTomato SEQ ID NO: 73 digested by the enzymes SphI and AgeI (6073pb). This cloning required 4 independent PCRs.

[0682] The first PCR allowed the amplification from the plasmid pCATGFP LoxP of SEQ ID NO: 38, of a CAT-GFP selection cassette SEQ ID NO: 6 comprising the promoter αTubuline, the cat-gfp selection gene and the 3′ UTR region of sag1 of T. gondii, with the addition of the Lox2272 site of SEQ ID NO: 68 with the F AgeI tub primers SEQ ID NO: 74 and 3 UTR Lox2272 R SEQ ID NO: 75 (2090pb).

[0683] The second PCR allowed amplification from the plasmid pT230 2G gra15II SEQ ID NO: 76, of the promoter gra15II SEQ ID NO: 71 with addition of the site Lox2272 of SEQ ID NO: 68 in 5′ with the primers pGra15 F Lox2272 of SEQ ID NO: 77 and P Gra15 R SEQ ID NO: 78 (1975pb).

[0684] The third PCR allowed the amplification from the plasmid pT230 2G gra15II SEQ ID NO: 76, of the gene gra15II HA with the 3′ UTR of sag1 SEQ ID NO: 79 (2092 bp) with the primers Gra15F SEQ ID NO 126 and UTR sag1 rop16 R SEQ ID NO 127.

[0685] The primers used for the construction of this plasmid are listed in Table 9 below.

TABLE 9
Primers used for the construction
of the plasmid pT230 2G Gra15II

| | |
|---|---|
| tub F AgeI | SEQ ID NO: 74: |
| | GTGATCCTGGTTGGACCGGT |
| 3 UTR 1ox2272 R | SEQ ID NO: 75: |
| | ATAACTTCGTATAAAGTATC |
| | CTATACGAAGTTATCGGTTC |
| | GACTAGAACAACTG |
| pGra15 F 1ox2272 | SEQ ID NO: 77: |
| | CTTTATACGAAGTTATGGAT |
| | CCACTAGTTGACTGCC |
| P Gra15 R | SEQ ID NO: 78: |
| | GTCACCATTGTTGAATGC |
| Gra15F | SEQ ID NO: 126: |
| | GCATTCAACAATGGTGAC |
| UTR sagl rop16 R | SEQ ID NO: 127: |
| | CGAATTTCGGGAGTTCTC |
| | GGGGGGGCAAGAATTGTG |
| Ropl6F | SEQ ID NO: 81: |
| | GAACTCCCGAAATTCGTCAA |
| Rop16R SphI | SEQ ID NO: 82: |
| | AATACACGCGACCGCATGC |

[0686] The last PCR allowed the amplification of a part of 3′Rop16 SEQ ID NO: 80 with the primers Rop16F SEQ ID NO: 81 and Rop16R SphI SEQ ID NO: 82 (570pb) on the plasmid pTgrop16 KO CAT-tdTomato SEQ ID NO: 73 as matrix.

[0687] The 4 amplified PCR fragments were directly cloned in the vector pTgrop16 KO CAT-tdTomato SEQ ID NO: 73 digested by AgeI and SphI using the Ozyme In-Fusion® kit (In-Fusion® HD Cloning Kit—Clonetech). In-Fusion® cloning technology allows one-step cloning without purification or digestion of one or more PCR products in a linearized vector. Complementary ends at the ends of adjacent fragments are added by PCR. The reaction is done according to the manufacturer's recommendations. The plasmid obtained is called pTgRop16KO-Gra15IIKI-CAT-GFP Lox2272 of SEQ ID NO: 67. The plasmid named pTgRop16KO-Gra15IIKI-CAT-GFP Lox2272 of SEQ ID NO: 67 therefore contains a CAT-GFP cassette SEQ ID NO: 6 and a gra15HAII expression cassette SEQ ID NO: 69, framed by a 5′ HR sequence of the tgrop16 gene SEQ ID NO: 99 and a 3′ HR sequence of the tgrop16 gene SEQ ID NO: 100.

[0688] Construction of the Toxo Tgmic1-3 KO Rop16 KO Gra15II KI-2G Strain

[0689] The construction of the second generation attenuated live strain, called Toxo tgmic1-3 KO rop16 KO Gra15II KI-2G, is done in 2 distinct steps:
[0690] 1. Deletion by homologous recombination of the rop16 gene and its replacement by the CAT-GFP selection cassette SEQ ID NO: 6 framed by sequences Lox2272 SEQ ID NO: 38 and the cassette gra15II SEQ ID NO: 69.
   [0691] To obtain this strain, the Toxo tgmic3 KO-2G strain is electroporated with the plasmid pTgRop16KO-Gra15IIKI-CAT-GFP Lox2272 of SEQ ID NO: 67 (20 μg) linearized by PciI, according to the protocol previously described. After electroporation, the tachyzoites are deposited on a monolayer of HFF cells in culture. For mutant selection, the culture medium is replaced and supplemented by the selection agent (chloramphenicol 20 μM) 24 hours after electroporation. 10 to 15 days after selection, the parasites are subcloned in 96-well plate on a monolayer of HFF cells and the clones of interest are identified by PCR after performing genomic DNA extraction from the clones of interest. The strain obtained is called Toxo tgmic1-3 KO rop16 KO Gra15II KI.
   [0692] In this strain, the rop16 gene has been deleted and replaced by the CATGFP selection cassette SEQ ID NO: 6 and the expression cassette of gra15HAII SEQ ID NO: 69. Thus, the theoretical sequence at the locus of the deleted rop16 gene containing the CATGFP selection cassette and the gra15HAII expression cassette is SEQ ID NO: 112.
   [0693] In this strain, the mic3 gene was deleted and the CATGFP selection cassette SEQ ID NO: 6 was excised. Thus, the theoretical sequence at the locus of the deleted mic3 gene containing a single LoxP site SEQ ID NO: 12, is SEQ ID NO: 19.
   [0694] In this strain, the mic1 gene was deleted and the CATGFP selection cassette SEQ ID NO: 6 was excised. Thus, the theoretical sequence at the locus of the deleted mic1 gene containing a single LoxN site SEQ ID NO: 5, is SEQ ID NO: 92.
[0695] 2. Deletion of the selection cassette: the obtained Toxo tgmic1-3 KO rop16 KO Gra15II KI strain is electroporated with the plasmid pT-SAG1-CRE-Recombinase SEQ ID NO: 15 (FIG. 2-C). The transiently expressed enzyme will allow the excision of the CAT-GFP selection cassette. After electroporation, the tachyzoites are deposited on a monolayer of HFF cells in culture. After 2 to 7 days of culture, the parasites are subcloned in 96-well plate on a monolayer of HFF cells and the clones of interest are identified by PCR after performing DNA genomic DNA extraction from the clones of interest. The strain obtained is called Toxo tgmic1-3 KO rop16 KO Gra15II KI-2G.
   [0696] In this strain, the rop16 gene was deleted and replaced by the expression cassette of gra15HAII SEQ ID NO: 69 and the CATGFP selection cassette of SEQ ID NO: 6 was excised. Thus, the theoretical sequence at the locus of the deleted rop16 gene containing the single site Lox2272 cassette SEQ ID NO: 68 and the expression cassette of gra15HAII is SEQ ID NO: 93.
   [0697] In this strain, the mic3 gene was deleted and the CATGFP selection cassette SEQ ID NO: 6 was excised. Thus, the theoretical sequence at the locus of the deleted mic3 gene containing a single LoxP site SEQ ID NO: 12, is SEQ ID NO: 19.
   [0698] In this strain, the mic1 gene was deleted and the CATGFP selection cassette SEQ ID NO: 6 was excised. Thus, the theoretical sequence at the locus of the deleted mic1 gene containing a single LoxN site SEQ ID NO: 5, is SEQ ID NO: 92.

[0699] Validation of the Toxo Tgmic1-3 KO Rop16 KO Gra15II KI-2G Strain by PCR

[0700] To validate the Toxo tgmic1-3 KO rop16 KO Gra15II KI 2G strain, PCR analyses are performed using genomic DNA extracted with DNAzol from a parasitic pellet composed of 10⁷ parasites. The primers used for PCR are described in FIG. 11-C and are detailed in Table 10 below. PCR products are analyzed by agarose gel electrophoresis (FIG. 9-B). Their expected and observed sizes are also described in Table 11 below.

TABLE 10
List of primers used for the validation of the
Toxo tgmic1-3 KO rop16 KO Gra15II KI 2G strain.

| | | Primer | | | Primer | |
|---|---|---|---|---|---|---|
| | | F | Sequence | | R | Sequence |
| Tgrop16 | Rg 1 | AGD rop | SEQ ID NO: 83 | Rg 2 | AGD rop | SEQ ID NO: 84 |
| (mix1) | | 16CDS F | GTTTGAGGAAGCGC | | 16CDS R | TGCTGTGATTTCGC |
| | | | AAAAAG | | | AAGTTC |
| Upstream | Rg 3 | Rop 16KO | SEQ ID NO: 85 | Rg 4 | Amont | SEQ ID NO: 86 |
| KO | | valid | ACCCCCTGACCCCT | | ropl6R | TCGTCGTGGTATTC |
| validation | | 5F1 | TGTCTG | | | ACTCCA |
| (mix2) | | | | | | |
| Downstream | Rg 5 | Gra15 | SEQ ID NO: 87 | Rg 6 | Aval | SEQ ID NO: 88 |
| KO | | qPCR 2F | CACGTACACAACCC | | ropl6R | AAAACGAATGCGAA |
| validation | | | ATCTCG | | | GGAAGA |
| (mix3) | | | | | | |
| Scar | Rg 7 | cicropl6 | SEQ ID NO: 89 | Rg 8 | cicrop16 | SEQ ID NO: 90 |
| rop16KO | | loxF | CAGTACCAGCCACG | | loxGra R | CAAGCAATCTGTGG |
| gra15 | | | TTAGCA | | | CAAAAA |
| LoxP | | | | | | |
| gra15 | | | | | | |
| (mix4) | | | | | | |
| Gra15I/II | | Gra15I/ | SEQ ID NO: 109 | | Gra15I/ | SEQ ID NO: 110 |
| (mix5) | | II F | GTGCAAAGCCAACT | | II F | GGACCTGGATCAGA |
| | | | TCCACT | | | GATCGT |

TABLE 11
Expected amplicon size (in base pairs) of the different
PCRs validating the construction of the Toxo tgmic1-3
KO rop16 KO Gra15II KI 2G strain

| | Toxo | Toxo tgmic1-3 | Toxo tgmic1-3 |
|---|---|---|---|
| | tgmic1-3 | KO rop16 KO | KO rop16 KO |
| | KO - 2G | Gra15II KI | Gra15II KI -2G |
| Tgrop16 (mix1) | 1682 | — | — |
| Validation KO | — | 2759 | — |
| 5′ Tgrop16 (mix2) | | | |
| Validation KO | — | 2870 | 2870 |
| 3′ Tgrop16 (mix3) | | | |
| Scar rop16KO | — | 2550 | 321 |
| gra15LoxP (mix4) | | | |
| Gra15I/II (mix5) | 560 | 560 and 308 | 560 and 308 |

[0701] The electrophoresis of the PCR products produced with the primers rg1 SEQ ID NO: 83 and rg2 SEQ ID NO: 84 (mix 1) allow to highlight a band with 1682 base pairs for the Toxo tgmic1-3 KO-2G strain, according to the expected band size and confirming the presence of the tgrop16 gene in this strain. This band is not detected in Toxo tgmic1-3 KO rop16 KO Gra15II KI and Toxo tgmic1-3 KO rop16 KO Gra15II KI-2G strains confirming gene suppression in these strains.

[0702] The electrophoresis of the PCR products produced with the primers rg3 SEQ ID NO: 85 and rg4 SEQ ID NO: 86 (mix 2) make it possible to highlight a band with 2759 base pairs for the Toxo tgmic1-3 KO rop16 KO Gra15II KI strain, in accordance with the size of the expected bands and confirming the suppression of the tgrop16 gene in this strain and the insertion of the CATGFP and gra15II selection genes instead of the tgrop16 gene. This band is not detected in Toxo tgmic1-3 KO-2G and Toxo tgmic1-3 KO rop16 KO Gra15II KI-2G strains. The electrophoresis of the PCR products made with the primers rg5 SEQ ID NO: 87 and rg6 SEQ ID NO: 88 (mix 3) allow to highlight a band with 2870 base pairs for the strains Toxo tgmic1-3 KO rop16 KO Gra15II KI and Toxo tgmic1-3 KO rop16 KO Gra15II KI-2G, according to the size of the expected bands and confirming the suppression of the tgrop16 gene in this strain and the insertion of the gra15II gene instead of the tgrop16 gene. This band is not detected in the Toxo tgmic1-3 KO-2G strain.

[0703] The electrophoresis of the PCR products produced with the primers rg7 SEQ ID NO: 89 and rg8 SEQ ID NO: 90 (mix 4) allow to highlight a band of 2550 base pairs for the Toxo tgmic1-3 KO rop16 KO Gra15II KI strain confirming the presence of the CATGFP selection cassette SEQ ID NO: 6 in place of the tgrop16 gene. Finally, a band of 321 base pairs is identified for the Toxo tgmic1-3 KO rop16 KO Gra15II KI-2G strain confirming the deletion of the cat-gfp selection gene SEQ ID NO: 2 in this strain, leaving a Lox2272 of SEQ ID NO: 68 scar in the genome. No bands are not detected in the Toxo tgmic1-3 KO-2G strain.

[0704] The “scar” PCR product obtained for the Toxo tgmic1-3 KO rop16 KO Gra15II KI-2G strain (321 base pairs) was sequenced and the sequencing confirmed that:
[0705] the tgrop16 gene has been deleted and that the CAT-GFP selection cassette SEQ ID NO: 6 has been deleted by the action of Cre-Recombinase leaving a Lox2272 scar SEQ ID NO: 68 in accordance with the expected sequence (FIG. 9-C).

[0706] The electrophoresis of the PCR products produced with the primers SEQ ID NO: 109 and SEQ ID NO: 110 (mix 5) make it possible to highlight a band with 560 base pairs for the Toxo tgmic1-3 KO-2G strains, in accordance with the expected band size and confirming the presence of the tggra15 gene in this strain. An additional band of 308 base pairs is detected in Toxo tgmic1-3 KO rop16 KO Gra15II KI and Toxo tgmic1-3 KO rop16 KO Gra15II KI-2G strains confirming the presence of the gra15HAII gene in these strains.

[0707] Validation of the Toxo Tgmic1-3 KO Rop16 KO Gra15II KI-2G Strain by Immunofluorescence

[0708] Tachyzoites are grown 24 hours on glass lamellae covered with a monolayer of HFF cells. The infected cells were washed twice with PBS1×, and fixed with 4% formaldehyde for 30 minutes. After 3 washes in PBS1×, the infected HFF cells were permeabilized with 0.1% Triton X-100 in PBS1× for 5 min. After 3 washes with PBS 1×, a saturation step is performed with a solution of PBS 1×/SVF 10% for 30 min. The cells were then incubated with the primary antibody diluted in 2% SVF for 1 hour, washed 3 times with PBS1× and incubated with a secondary antibody diluted in 2% PBS/SVF solution for 1 hour. After 2 washes with PBS1×, the glass slides are mounted on a slide with Immu-Mount™ and observed under a fluorescence microscope.

[0709] The primary antibody used is the anti-HA mouse antibody which detects the expression of the protein GRA15II-HA SEQ ID NO: 123 in the parasite. The secondary antibody is the commercial secondary antibody: Alexa Fluor® 594 anti rabbit goat (Life Technologies A-11012). The antibodies are diluted 1/1000 times in 2% SVF PBS.

[0710] For the wild strain Toxo tgmic1-3 KO 2G, no red fluorescence is observed at the apical pole of the parasite, revealing the absence of the protein GRA15II-HA. On the contrary, for the Toxo tgmic1-3 KO rop16 KO gra15II KI strain, a red fluorescence is observed showing the protein GRA15II-HA. The Toxo tgmic1-3 KO rop16 KO gra15II KI strain expresses a green fluorescent reflecting the expression of the CATGFP protein SEQ ID NO: 120 whereas after the action of the Cre recombinase, the Toxo tgmic1-3 KO rop16 KO gra15II KI Lox2272 strain is no longer fluorescent (FIG. 10).

### EXAMPLE 4: CONSTRUCTION OF RECOMBINANT STRAINS EXPRESSING THE M2eGPI PROTEIN AFTER TARGETED INTEGRATION

[0711] The objective of this experiment is to evaluate whether the strains Toxo tgmic1-3 KO 2G and Neo ncmic1-3 KO 2G can express heterologous antigens.

[0712] Cultivation of Parasites

[0713] All tachyzoites of the Toxoplasma gondii strain used were produced as human fibroblasts (HFF) grown in minimal Dulbecco medium (DMEM) supplemented with 10% fetal calf serum (SVF), 2 mM glutamine, 100 U/mL penicillin and 100 U/mL streptomycin. They were collected after mechanical lysis of the host cells by 3 passages in 25G syringes.

[0714] Plasmid Construction

[0715] Plasmid pUC 4G2 ICreI

[0716] The plasmid pUC 4G2 ICreI SEQ ID NO: 156 was constructed to allow the integration of a heterologous transgene into the strains Toxo tgmic1-3 KO 2G, Neo ncmic1-3 KO 2G and Toxo tgmic1-3 KO rop16 KO gra15II KI.

[0717] The plasmid is notably composed of:
[0718] 1—a selection cassette dhfr*-ty-tk SEQ ID NO: 229 (Donald & Roos, Proc Natl Acad Sci U S S A. 1993 Dec. 15; 90(24):11703-7; Scahill et al., (Mol Biochem Parasitol. 2008 January; 157(1):73-82. Epub 2007 Oct. 6.)), placed under the dependence of the dhfr* promoter SEQ ID NO: 230 of T. gondii and downstream of the 3′ UTR sequence of the dhfr* gene SEQ ID NO: 231 of Toxoplasma gondii. This selection cassette encodes the fusion protein DHFR*TYTK SEQ ID NO: 207 and allows positive selection by pyrimethamine and negative selection by ganciclovir.
[0719] 2—an expression cassette consisting of the promoter of α-Tub8 SEQ ID NO: 128 (Soldati et al., Mol Cell Biol. 1995 January; 15(1):87-93—fusion of part of the promoter of Tgsag1 and Tgtub), an MCS multiple cloning site to allow future integration of heterologous transgene and the 3′ UTR sequence of the tgsag1 gene SEQ ID NO: 4 which should stabilize the mRNA of the heterologous gene.

[0720] The dhfr*-ty-tk selection cassette was made from 3 PCR fragments obtained with the primers in Table 20:
[0721] The amplification of the first PCR fragment SEQ ID NO: 129 was performed on the plasmid pUC18DHFR* SEQ ID NO: 130 (Donald & Roos 1993, same reference as above) with the Dhtk1 primers SEQ ID NO: 131 and Dhtk2 SEQ ID NO: 132 (674pb) and allows the amplification of the end of the coding sequence of DHFR* SEQ ID NO: 133 and to add the sequence coding the TY in 3′ SEQ ID NO: 134.
[0722] The second PCR was performed on a synthesized sequence of the Human herpesvirus 1 (TK) Thymidine Kinase gene SEQ ID NO: 135 with Dhtk3 SEQ ID NO: 136 and Dhtk4 SEQ ID NO: 137 (1161pb) primers and allows the amplification of the Thymidine Kinase coding sequence with the addition of the TY coding sequence in 5′ SEQ ID NO: 138.
[0723] The amplification of the third PCR fragment was performed on pUC18DHFR* SEQ ID NO: 130 with Dhtk5 primers SEQ ID NO: 139 and Dhtk6 SEQ ID NO: 140 (363pb) and allows the amplification of the end of the coding sequence of Thymidine Kinase and the 3′ UTR of DHFR* SEQ ID NO: 141.

[0724] The second and third PCR fragments are fused by overlapping PCR with the primers Dhtk3 SEQ ID NO: 136 and Dhtk6 SEQ ID NO: 140 (1501pb) to give the sequence SEQ ID NO: 191. Finally, the first fragment SEQ ID NO: 129 digested by BamHI and BglII (646pb) and the fusion of the other two PCR SEQ ID NO: 191 digested by BamHI and XbaI (1474pb) are cloned in the plasmid pUC18DHFR* SEQ ID NO: 130 digested by BglII and XbaI (5258pb). The plasmid obtained is called pUC18DHFR*TYTK SEQ ID NO: 142.

TABLE 20
List of primers used

| | | | | | |
|---|---|---|---|---|---|
| Dhtk | AF | SEQ ID NO: 131 | Dhtk | AF | SEQ ID NO: 132 |
| 1 | DHFRi | CTGAGAAGGGCGTG | 2 | DHFR | GTCAAGTGGATCCT |
| | nt | AAGATC | | TY R | GGTTAGTATGGACC |
| | Bgl | | | | TCGACAGCCATCTC |
| | F | | | | CATCTGGATTCG |
| Dhtk | TY | SEQ ID NO: 136 | Dhtk | HSVT | SEQ ID NO: 137 |
| 3 | HSVT | GAGGTCCATACTAA | 4 | K stop | TTAGTTAGCCTCCC |
| | K F | CCAGGATCCACTTG | | TAA R | CCATCTCCC |
| | | ACATGGCTTCGTAC | | | |
| | | CCCTGCCATCA | | | |
| Dhtk | AFHS | SEQ ID NO: 139 | Dhtk | AF | SEQ ID NO: 140 |
| 5 | VTK3 | GGGAGATGGGGGAG | 6 | 3UTR | TTTTTCTAGAATCC |
| | UTRD | GCTAACTAACGGAA | | DHFR | TGCAAGTGCATAGA |
| | HFRF | ATACAGAAGCTGCC | | XbaR | AGGAA |
| | | CGTCTCT | | | |

[0725] The expression cassette is composed of the promoter of α-Tub8 SEQ ID NO: 128 (Soldati et al, 1995, same reference as above), a multiple cloning site to allow future integration of heterologous transgene and the 3′ UTR sequence of the sag1 gene SEQ ID NO: 4 which should stabilize the mRNA of the heterologous gene. The promoter part of α-Tub8 SEQ ID NO: 128 was obtained by PCR with the primers K7mcs1 SEQ ID NO: 143 and K7mcs2 SEQ ID NO: 144 (530pb) on the pTUB8TY TAIL SEQ ID NO: 145 (Meissner et al., J Cell Sci. 2002; 115:563-574). The 3′ UTR sequence of the sag1 gene SEQ ID NO: 4 was obtained by PCR with the primers K7mcs3 SEQ ID NO: 146 and K7mcs4 SEQ ID NO: 147 (395 bp). Then the two PCR fragments were fused by overlapping PCR with the primers K7mcs1 SEQ ID NO: 143 and K7mcs4 SEQ ID NO: 147 (914pb) to give the sequence SEQ ID NO: 192. The overlapping PCR SEQ ID NO: 192 digested by KpnI and SacI (902pb) was cloned in pUC18 (commercial plasmid) KpnI SacI (2682pb). The primers used for PCRs are detailed in Table 12 below. The plasmid obtained is pUC 18-Tub8MCS 3UTR SEQ ID NO: 148.

TABLE 12
List of primers used for
the construction of the
expression cassette

| | Primer | | | Primer | |
|---|---|---|---|---|---|
| | F | Sequence | | R | Sequence |
| K7mcs1 | pTUB8 | SEQ ID | K7mcs2 | Tub 8 | SEQ ID |
| | MCS 4 | NO: 143 | | Ter R | NO: 144 |
| | F | AAAGGTA | | | AACTTAAG |
| | | CCTCTAG | | | AATTTTGT |
| | | AAGTATA | | | TTAAACAG |
| | | CTATTCG | | | GG |
| | | AAAAACT | | | |
| | | AGTATCG | | | |
| | | ATAAGCT | | | |
| | | GAACAC | | | |
| K7mcs3 | MCS | SEQ ID | K7mcs4 | MCS | SEQ ID |
| | 3UTR | NO: 146 | | 3UT R | NO: 147 |
| | TER F | TTTAAAC | | TER R | TTTGAGCT |
| | | AAAATTC | | | CTCTAGAA |
| | | TTAAGTT | | | TTTAAATC |
| | | GCGGC | | | CTAGG |

[0726] The expression cassette Tub8MCS 3UTR SEQ ID NO: 149 obtained by digesting pUC 18-Tub8MCS 3UTR SEQ ID NO: 148 with the enzyme XbaI (890pb) was then cloned in the plasmid pUC18 DHFR*TYTK SEQ ID NO: 142 digested by XbaI and dephosphorylated (7378pb). The plasmid obtained has its Tub8MCS 3UTR expression cassette transcribed in the opposite direction to the DHFR*TYTK cassette. The plasmid obtained is called pUC4G2 SEQ ID NO: 150.

[0727] The PCR fragment SEQ ID NO: 193 amplified with the primers IcreI1 SEQ ID NO: 151 and IcreI2 SEQ ID NO: 152 on the pTsag1IcreI αβγ SEQ ID NO: 153 (142pb) and the PCR fragment SEQ ID NO: 194 amplified with the primers IcreI3 SEQ ID NO: 154 and IcreI4 SEQ ID NO: 155 on pUC4G2 SEQ ID NO: 150 (153pb) allow the addition of the sequence αβ IcreI SEQ ID NO: 157. The two PCR fragments SEQ ID NO: 193 and SEQ ID NO: 194 were directly cloned in the plasmid pUC4G2 SEQ ID NO: 150 digested by the restriction enzymes Pml I and KasI (7990pb) with the Ozyme In-Fusion technique.

[0728] Then the fragment of PCR SEQ ID NO: 195 amplified with the primers IcreI5 SEQ ID NO: 159 and IcreI6 SEQ ID NO: 160 on the pTIcreI100 SEQ ID NO: 158 (546pb) and the fragment of PCR SEQ ID NO: 196 amplified with the primers IcreI7 SEQ ID NO: 161 and IcreI8 SEQ ID NO: 162 on pTsag1IcreI αβγ SEQ ID NO: 153 (133pb) allow the addition of the sequence IcreI βγ SEQ ID NO: 163 in the plasmid previously described digested by the restriction enzymes NsiI and AvrII (7734pb). The plasmid obtained is called pUc4G2 IcreI SEQ ID NO: 164. The primers used for PCRs are detailed in Table 21 below.

TABLE 21
List of primers used

| | | | | | |
|---|---|---|---|---|---|
| Icrei | PCR | SEQ ID NO: 151 | Icrei | oz4g | SEQ ID NO: 152 |
| 1 | oz4g | AATACCGCATCAGGCGCCTAGAA | 2 | mn1Ic | AAAACGTCGTGAGA |
| | mn1 | CCTGTTAAAAATAT | | reIr | CAGTTTGGTGAGAT |
| | F | | | | ATCTTCAAAAGATA |
| | | | | | TATAGC |
| Icrei | oz4g | SEQ ID NO: 154 | Icrei | oz4g | SEQ ID NO: 155 |
| 3 | mn2 | GTCTCACGACGTTTTGAACCCAG [symbol] | 4 | mn2 R | CGGATATGGTTACA |
| | IcreIF | [symbol] | | | CGTG |
| Icrei | oz4g | SEQ ID NO: 159 | Icrei | oz4g3 | SEQ ID NO: 160 |
| 5 | 3F | CGCCTCCGTCCCATGCAT | 6 | cre R | CCAAACTGTCTCAC |
| | | | | | GACGTT |
| Icrei | oz4g4 | SEQ ID NO: 161 | Icrei | oz4g4 | SEQ ID NO: 162 |
| 7 | FIcreI | CGTGAGACAGTTTGGCTAAAAATT | 8 | Ravr | GAGGCGCGCCAACC |
| | | TATTTTAAATAATCTTAT | | II | TAGGAGGGCCCGGG |
| | | | | | CGCCATGGC |

[0729] Plasmid pUC 4G2 IcreI M2eGPI SEQ ID NO: 164

[0730] This plasmid will allow the production of a fusion protein sag1 M2eGPI SEQ ID NO: 165, comprising the protein SAG1 of Toxoplasma gondii SEQ ID NO: 166, a 5 M2e repetition (Nter fragment of Influenza virus protein M2) spaced by linkers (Lee et al, 2015, PLoS ONE 10(9): e0137822. doi:10.1371/day.pone.0137822) SEQ ID NO: 167 and Cter a GPI anchoring sequence of the SAG1 protein of Toxoplasma gondii SEQ ID NO: 169. The amplification of 3 PCR fragments was necessary for this construction. The amplification of the first PCR fragment SEQ ID NO: 197 was performed on the genomic DNA of Toxoplasma gondii of the coding sequence of sag1 SEQ ID NO: 170 with the primers da SEQ ID NO: 171 and db SEQ ID NO: 172 (906pb). The second PCR SEQ ID NO: 198 was performed on a synthesized sequence comprising a repetition of 5 M2e SEQ ID NO: 173 (Lee et al) with primers dc SEQ ID NO: 174 and dd SEQ ID NO: 175 (588pb). This M2e sequence has been optimized for expression in Toxoplasma gondii. The amplification of the third PCR fragment SEQ ID NO: 199 was performed on the genomic DNA of Toxoplasma gondii of the coding sequence of sag1 (GPI anchor part) SEQ ID NO: 176 with the primers of SEQ ID NO: 177 and df SEQ ID NO: 178 (98pb). The primers used for PCRs are detailed in Table 13 below.

TABLE 13
List of primers used for the construction
of plasmids pUC 4G2 IcreI M2eGPI

| | Primer | | | Primer | |
|---|---|---|---|---|---|
| | F | Sequence | | R | Sequence |
| da | Ozsa | SEQ ID NO: 171 | db | Sag1 | SEQ ID NO: 172 |
| | g14G F | CTTGAATTCCCTGT | | M2e R | TCAGCAAGGACCTA |
| | | TTAAACGACAAAAt | | | GGTGCAGCCCCGGC |
| | | gtttccgaaggcag | | | AA |
| | | tg | | | |
| dc | M2e F | SEQ ID NO: 174 | dd | OzM2e | SEQ ID NO: 175 |
| | | CCTAGGTCCTTGCT | | GPI R | GGCTGTTCCCGCAG |
| | | GACTGA | | | CCGTAGAATCGAGA |
| | | | | | CCGAGGA |
| de | oZ | SEQ ID NO: 177 | df | oZ | SEQ ID NO: 178 |
| | GPI F | GCTGCGGGAACAGC | | GPI R | ACCATGGAAGCGGC |
| | | CAGTCA | | | CGCTTACGCGACAC |
| | | | | | AAGCTGCGAT |

[0731] The PCR fragments were directly cloned in the plasmid p4G2 ICreI SEQ ID NO: 156 digested by the enzymes PmeI and NotI (8344pb) with the Ozyme In-Fusion technique.

[0732] Plasmid pUC 4G2 IcreI M2eGPI LoxP of SEQ ID NO: 179

[0733] The LoxP site of SEQ ID NO: 12 was introduced by PCR into the plasmid PUC 4G2 IcreI M2eGPI SEQ ID NO: 164 digested PciI and PmeI (8901 bp). The PCR fragment SEQ ID NO: 200 obtained with the primers aa SEQ ID NO: 180 and ab SEQ ID NO: 181 (438pb) and the PCR fragment SEQ ID NO: 201 obtained with the primers ac SEQ ID NO: 182 and ad SEQ ID NO: 183 (534pb) were cloned with the Ozyme In-Fusion technique in the plasmid PUC 4G2 IcreI M2eGPI SEQ ID NO: 164 digested PciI and PmeI. The primers used for PCRs are detailed in Table 14 below.

TABLE 14
List of primers used for the
introduction of the LoxP site

| | Primer | | | Primer | |
|---|---|---|---|---|---|
| | F | Sequence | | R | Sequence |
| aa | pUC4G | SEQ ID NO: 180 | ab | Puc4G | SEQ ID NO: 181 |
| | PciI F | GCTGGCCTTTTGCT | | loxP R | TATAGCATACATTA |
| | | CACATGT | | | TACGAAGTTATTAG |
| | | | | | TATACTTCTAGAGG |
| | | | | | ATCC |
| ac | Puc4G | SEQ ID NO: 182 | ad | pUC4G | SEQ ID NO: 183 |
| | loxP F | TATAATGTATGCTA | | PmeI R | GAAACATTTTGTCG |
| | | TACGAAGTTATAAA | | | TTTAAAC |
| | | CTAGTATCGATAAG | | | |
| | | CTTG | | | |

[0734] Plasmid pUC 4G2 IcreI M2eGPI LoxN of SEQ ID NO: 184

[0735] The LoxN site SEQ ID NO: 5 was introduced by PCR into the plasmid PUC 4G2 IcreI M2eGPI SEQ ID NO: 164 digested PciI and PmeI (8901 bp). The PCR fragment SEQ ID NO: 202 obtained with the primers aa SEQ ID NO: 180 and bb SEQ ID NO: 181 (438pb) and the PCR fragment SEQ ID NO: 203 obtained with the primers be SEQ ID NO: 182 and ad SEQ ID NO: 183 (534pb) were cloned with the Ozyme In-Fusion technique in the plasmid PUC 4G2 IcreI M2eGPI SEQ ID NO: 164 digested PciI and PmeI. The primers used for PCRs are detailed in Table 15 below.

TABLE 15
List of primers used for the
introduction of the LoxN site

| | Primer | | | Primer | |
|---|---|---|---|---|---|
| | F | Sequence | | R | Sequence |
| aa | pUC4G | SEQ ID NO: 180 | bb | Puc4G | SEQ ID NO: 185 |
| | PciI | GCTGGCCTTTTGCT | | loxN R | TATAAGGTATACTA |
| | F | CACATGT | | | TACGAAGTTATTAG |
| | | | | | TATACTTCTAGAGG |
| | | | | | ATCC |
| bc | Puc4G | SEQ ID NO: 186 | ad | pUC4G | SEQ ID NO: 183 |
| | loxN | TATAGTATACCTTA | | PmeI R | GAAACATTTTGTCG |
| | F | TACGAAGTTATAAA | | | TTTAAAC |
| | | CTAGTATCGATAAG | | | |
| | | CTTG | | | |

[0736] Construction of Toxo Tgmic1-3 KO-2G M2eGPI Strains Targeted or Random Integration. Targeted Integration into the LoxP Site

[0737] The ToxoKO mic1-3KO 2G strain is electroporated with 20 μg of purified circular plasmids pUC 4G2 IcreI M2eGPI LoxP of SEQ ID NO: 179 and pTsag1 Cre recombinase SEQ ID NO: 15 according to the previously described protocol. After electroporation, the tachyzoites are deposited on a monolayer of HFF cells in culture. For mutant selection, the culture medium is replaced and supplemented by the selection agent (chloramphenicol 20 μM) 24 hours after electroporation. 10 to 15 days after selection, the parasites are subcloned in 96-well plate on a monolayer of HFF cells and the clones of interest are identified by PCR after performing genomic DNA extraction from the clones of interest. The strain obtained is called Toxo tgmic1-3 KO-2G M2eGPI LoxP.

[0738] Targeted Integration into the LoxN Site

[0739] The ToxoKO mic1-3KO 2G strain is electroporated with 20 μg of purified circular plasmids pUC 4G2 IcreI M2eGPI LoxN of SEQ ID NO: 184 and pTsag1 Cre recombinase SEQ ID NO: 15 according to the protocol previously described. After electroporation, the tachyzoites are deposited on a monolayer of HFF cells in culture. For mutant selection, the culture medium is replaced and supplemented by the selection agent (chloramphenicol 20 μM) 24 hours after electroporation. 10 to 15 days after selection, the parasites are subcloned in 96-well plate on a monolayer of HFF cells and the clones of interest are identified by PCR after performing genomic DNA extraction from the clones of interest. The strain obtained is called Toxo tgmic1-3 KO-2G M2eGPI LoxN.

[0740] Random Integration

[0741] The ToxoKO mic1-3KO 2G strain is electroporated with 20 μg of the purified linearized plasmid pUC 4G2 IcreI M2eGPI LoxP of SEQ ID NO: 179 or pUC 4G2 IcreI M2eGPI LoxN of SEQ ID NO: 184 according to the previously described protocol. After electroporation, the tachyzoites are deposited on a monolayer of HFF cells in culture. For mutant selection, the culture medium is replaced and supplemented by the selection agent (chloramphenicol 20 μM) 24 hours after electroporation. 10 to 15 days after selection, the parasites are analyzed for the expression of the fusion protein SAG1 M2eGPI SEQ ID NO: 165 (analysis on the total population).

[0742] Validation Toxo Tgmic1-3 KO-2G M2eGPI Targeted Integration by PCR Targeted Integration into the LoxP Site

[0743] Two PCRs are performed to validate clones that have selectively integrated the plasmid. To validate strains that have integrated the plasmids pUC 4G2 IcreI M2eGPI LoxP SEQ ID NO: 179, PCR analyses are performed from genomic DNA extracted with DNAzol from a parasitic pellet composed of 10⁷ parasites. The primers used for PCRs are detailed in Table 16 below. PCR products are analyzed by agarose gel electrophoresis. The clones that integrated the plasmid were validated by PCR with the primers ea SEQ ID NO: 187 and eb SEQ ID NO: 188 by obtaining the fragment SEQ ID NO: 204 (1719pb).

[0744] The second PCR validates the location of the plasmid insertion at the Tgmic3 LoxP locus. The clones having integrated one of the plasmids were validated by PCR with the primers ec SEQ ID NO: 189 and eb SEQ ID NO: 188 by obtaining the fragment SEQ ID NO: 205 (2704 bp).

TABLE 16
List of primers used for clone validation

| | Primer | | | Primer | |
|---|---|---|---|---|---|
| | F | Sequence | | R | Sequence |
| ea | seq | SEQ ID NO: 187 | eb | seq | SEQ ID NO: 188 |
| | TUB | AACCCGCGCAGAAG | | 3utr | ATGGGGCACATGCT |
| | MCS F | ACATCC | | MCS R | GCACGAA |
| ec | CN3 | SEQ ID NO: 189 | eb | seq | SEQ ID NO: 188 |
| | | AGAGGTTGACACCG | | 3utr | ATGGGGCACATGCT |
| | | ACAAAG | | MCS R | GCACGAA |

[0745] Targeted Integration into the LoxN Site

[0746] Two PCRs are performed to validate clones that have selectively integrated one of the plasmids. To validate strains that have integrated the plasmid pUC 4G2 IcreI M2eGPI LoxN of SEQ ID NO: 184, PCR analyses are performed from genomic DNA extracted with DNAzol from a parasitic pellet composed of 10⁷ parasites. The primers used for PCRs are detailed in Table 17 below. PCR products are analyzed by agarose gel electrophoresis. The clones having integrated one of the plasmids were validated by PCR with the primers ea SEQ ID NO: 187 and eb SEQ ID NO: 188 (1719pb) by obtaining the fragment SEQ ID NO: 204.

[0747] The second PCR is used to validate the location of the plasmid insertion at the Tgmic1 LoxN locus. The clones having integrated one of the plasmids were validated by PCR with the primers ed SEQ ID NO: 55 and eb SEQ ID NO: 54 (2366pb) by obtaining the fragment SEQ ID NO: 206.

TABLE 17
List of primers used for clone validation

| | Primer | | | Primer | |
|---|---|---|---|---|---|
| | F | Sequence | | R | Sequence |
| ed | Tg | SEQ ID NO: 190 | eb | seq | SEQ ID NO: 188 |
| | mic1 | CCCGTCTAGCAAGA | | 3utr | ATGGGGCACATGCT |
| | loxN | CCTCAA | | MCS R | GCACGAA |

[0748] Analysis by Flow Cytometry.

[0749] The expression level of M2eGPI SEQ ID NO: 165 was analyzed for different populations of recombinant parasites following specific labelling with an anti-M2 antibody (anti-influenza A virus M2 Protein antibody ab5416—Abcam). The expression of the M2eGPI transgene is similar or slightly higher for clones whose transgene is inserted in a targeted manner (located at the LoxP and LoxN scars at the mic1 or mic3 locus) than for populations whose transgene is inserted in a random manner. This result shows that the Toxo tgmic1-3 KO 2G strain is an expression vector optimized for transgene expression.

### EXAMPLE 5: CONSTRUCTION OF RECOMBINANT STRAINS OF TOXO TGMIC1-3 KO EXPRESSING THE CAT-GFP PROTEIN AFTER TARGETED OR RANDOM INTEGRATION OF THE CAT-GFP TRANSGENE

[0750] The objective of this experiment is to study the level of expression of the cat-gpf gene after random or targeted integration at the LoxP or LoxN site of the transgene.

[0751] Cultivation of Parasites

[0752] All tachyzoites of the Toxoplasma gondii strain used were produced as human fibroblasts (HFF) grown in minimal Dulbecco medium (DMEM) supplemented with 10% fetal calf serum (SVF), 2 mM glutamine, 100 U/mL penicillin and 100 U/mL streptomycin. They were collected after mechanical lysis of the host cells by 3 passages in 25G syringes.

[0753] Plasmid Construction

[0754] Plasmid pUC 4G2 IcreI CAT-GFP LoxP LoxP of SEQ ID NO: 221

[0755] The CATGFP fragment SEQ ID NO: 222 was amplified by PCR with the primers ca SEQ ID NO: 223 and cb SEQ ID NO: 224 (1488 bp) on the pCATGFP SEQ ID NO: 9. This PCR fragment was cloned with the In-Fusion technique of Ozyme in the plasmid pUC 4G2 IcreI M2eGPI LoxP of SEQ ID NO: 179 was digested by PmeI and NotI (8372pb-replacing M2eGPI by CATGFP). The primers used for PCRs are detailed in Table 18 below.

TABLE 18
List of primers used for the construction
of plasmids pUC 4G2 IcreI CAT-GFP

| | Primer | Sequence | | Primer | |
|---|---|---|---|---|---|
| | F | | | R | Sequence |
| ca | Oz | SEQ ID NO: 223 | cb | Oz | SEQ ID NO: 224 |
| | CAT | TTGAATTCCCTGTT | | CAT | ACCATGGAAGCGGC |
| | GFP | TCGACAAAATGCAT | | GFP | CGCTTAATCGAGCG |
| | 4G F | GAGAA | | 4G R | GGTCCTGG |

[0756] Plasmid pUC 4G2 IcreI CAT-GFP LoxN of SEQ ID NO: 225

[0757] The CATGFP fragment SEQ ID NO: 222 was amplified by PCR with the primers ca SEQ ID NO: 223 and cb SEQ ID NO: 224 (1488 bp) on the pCATGFP SEQ ID NO: 9. This PCR fragment was cloned with the In-Fusion technique of Ozyme in the plasmid pUC 4G2 IcreI M2eGPI LoxN of SEQ ID NO: 184 was digested by PmeI and NotI (8372pb-replacing M2eGPI by CATGFP). The primers used for PCRs are detailed in Table 18 above.

[0758] Construction of Toxo Tgmic1-3 KO-2G CATGFP Strains Targeted or Random Integration.

[0759] Targeted Integration into the LoxP Site

[0760] The ToxoKO mic1-3KO 2G strain is electroporated with 20 μg of purified circular plasmids pUC 4G2 IcreI CATGFP LoxP of SEQ ID NO: 221 and pTsag1 Cre recombinase SEQ ID NO: 15 according to the protocol previously described. After electroporation, the tachyzoites are deposited on a monolayer of HFF cells in culture. For mutant selection, the culture medium is replaced and supplemented by the selection agent (chloramphenicol 20 μM) 24 hours after electroporation. 10 to 15 days after selection, the parasites are subcloned in 96-well plate on a monolayer of HFF cells and the clones of interest are identified by PCR after performing genomic DNA extraction from the clones of interest. The strain obtained is called Toxo tgmic1-3 KO-2G CATGFP LoxP.

[0761] Targeted Integration into the LoxN Site

[0762] The ToxoKO mic1-3KO 2G strain is electroporated with 20 μg of purified circular plasmids pUC 4G2 IcreI CATGFP LoxN of SEQ ID NO: 225 and pTsag1 Cre recombinase SEQ ID NO: 15 according to the protocol previously described. After electroporation, the tachyzoites are deposited on a monolayer of HFF cells in culture. For mutant selection, the culture medium is replaced and supplemented by the selection agent (chloramphenicol 20 μM) 24 hours after electroporation. 10 to 15 days after selection, the parasites are subcloned in 96-well plate on a monolayer of HFF cells and the clones of interest are identified by PCR after performing genomic DNA extraction from the clones of interest. The strain obtained is called Toxo tgmic1-3 KO-2G CATGFP LoxN.

[0763] Random Integration

[0764] The ToxoKO mic1-3KO 2G strain is electroporated with 20 μg of the purified linearized plasmid pUC 4G2 IcreI CATGFP LoxP of SEQ ID NO: 221 or pUC 4G2 IcreI CATGFP LoxN of SEQ ID NO: 225 according to the previously described protocol. After electroporation, the tachyzoites are deposited on a monolayer of HFF cells in culture. For mutant selection, the culture medium is replaced and supplemented by the selection agent (chloramphenicol 20 μM) 24 hours after electroporation. 10 to 15 days after selection, the parasites are analyzed for the expression of the CATGFP protein SEQ ID NO: 120 (analysis on the total population).

[0765] Validation Toxo Tgmic1-3 KO-2G CATGFP Targeted Integration by PCR

[0766] Targeted Integration into the LoxP Site

[0767] Two PCRs are performed to validate clones that have selectively integrated the plasmid. To validate strains that have integrated the plasmids pUC 4G2 IcreI CATGFP LoxP SEQ ID NO: 221, PCR analyses are performed from genomic DNA extracted with DNAzol from a parasitic pellet composed of 10⁷ parasites. The primers used for PCRs are detailed in Table 16 above. PCR products are analyzed by agarose gel electrophoresis. The clones that integrated the plasmid were validated by PCR with the primers ea SEQ ID NO: 187 and eb SEQ ID NO: 188 and obtaining a fragment SEQ ID NO: 226 (1647pb).

[0768] The second PCR validates the location of the plasmid insertion at the Tgmic3 LoxP locus. The clones having integrated one of the plasmids were validated by PCR with the primers ec SEQ ID NO: 189 and eb SEQ ID NO: 188 and obtaining a fragment SEQ ID NO: 227 (2600 bp). The primers used for PCRs are detailed in Table 16.

[0769] Targeted Integration into the LoxN Site

[0770] Two PCRs are performed to validate clones that have selectively integrated the plasmid. To validate strains that have integrated the plasmid pUC 4G2 IcreI CATGFP LoxN SEQ ID NO: 225, PCR analyses are performed from genomic DNA extracted with DNAzol from a parasitic pellet composed of 10⁷ parasites. The primers used for PCRs are detailed in Table 17 above. PCR products are analyzed by agarose gel electrophoresis. The clones having integrated one of the plasmids were validated by PCR with the primers ea SEQ ID NO: 187 and eb SEQ ID NO: 188 and obtaining a fragment SEQ ID NO: 226 (1647pb). The primers used for PCRs are detailed in Table 16.

[0771] The second PCR is used to validate the location of the plasmid insertion at the Tgmic1 LoxN locus. The clones having integrated one of the plasmids were validated by PCR with the primers ed SEQ ID NO: 190 and eb SEQ ID NO: 188 and obtaining a fragment SEQ ID NO: 228 (2294 bp). The primers used for PCRs are detailed in Table 17.

[0772] Flow Cytometry Analysis

[0773] The expression level of CAT-GFP SEQ ID NO: 120 was analyzed in the different populations of recombinant parasites (Table 19). The expression of the CATGFP transgene is systematically slightly higher for clones whose transgene is inserted in a targeted manner (located at the LoxP and LoxN scars at the mic1 or mic3 locus) than for populations whose transgene is inserted in a random manner.

TABLE 19
Geometric mean fluorescence intensity of recombinant CATGFP strains.

| | Geometric mean fluorescence | | Geometric mean fluorescence |
|---|---|---|---|
| Parasite | intensity (GFP) | Parasite | intensity (GFP) |
| ToxoKO 2G | 912 | ToxoKO 2G | 912 |
| ToxoKO 2G M2eGPI LoxP | 6078 | ToxoKO 2G M2eGPI LoxN | 5496 |
| targeted at mic3 locus | | targeted at mic3 locus | |
| ToxoKO 2G2G M2eGPI | 4850 | ToxoKO 2G2G M2eGPI | 5340 |
| LoxP random 1 | | LoxN random 1 | |
| ToxoKO 2G2G M2eGPI | 1998 | ToxoKO 2G2G M2eGPI | 3978 |
| LoxP random 2 | | LoxN random 2 | |
| ToxoKO 2G2G M2eGPI | 4561 | ToxoKO 2G2G M2eGPI | 4936 |
| LoxP random 3 | | LoxN random 3 | |
| ToxoKO 2G2G M2eGPI | 5237 | ToxoKO 2G2G M2eGPI | 5268 |
| LoxP random 4 | | LoxN random 4 | |
| ToxoKO 2G2G M2eGPI | 4778 | ToxoKO 2G2G M2eGPI | 4519 |
| LoxP random 5 | | LoxN random 5 | |
| | | ToxoKO 2G2G M2eGPI | 4899 |
| | | LoxN random 6 | |

[0774] This result shows that the Toxo tgmic1-3 KO strain is an expression vector optimized for transgene expression.

### EXAMPLE 6: EFFICACY STUDY OF THE NEO NCMIC1-3 KO-2G STRAIN IN THE PREVENTION OF LETHAL NEOSPOROSIS IN A MOUSE MODEL

[0775] In this study, the attenuated live strain Neo ncmic1-3 KO-2G was tested as a preventive vaccine for neosporosis. The objective is to determine whether or not the vaccine strain Neo ncmic1-3 KO-2G prevents dissemination and acute infection in a mouse model of lethal neosporosis.

[0776] Materials and Methods

[0777] Production of Neo Ncmic1-3 KO-2G Parasites and the Nc-1 Strain.

[0778] The parasites Neo ncmic1-3 KO-2G and Nc-1 (used for the challenge) are produced on a confluent mat of VERO cells (ATCC CCL81) in a complete medium containing DMEM 1.5 g/L NaHCO₃, 12% (v/v) SVF decompleted, 100 UI/mL Penicillin-100 UI/mL Streptomycin.

[0779] Before infection of the cell wall, the cells are maintained independently of parasites. Each time VERO cells are passed, the mat is washed three times with 5 mL HBSS, detached with 1 mL pure trypsin, re-suspended in full medium, distributed at a rate of 7.5,¹⁰⁵ cells per 25 cm2 of culture surface. The cells are incubated at 37° C. with 5% CO2 and are available for parasitic amplification three days later.

[0780] At D-4, the cell mat is infected with 1·10⁶ parasites per 25 cm² of confluence cell culture.

[0781] The vaccine parasites are harvested 4 days later. In short, the parasite-infected cell mat is washed with a complete medium to remove extracellular parasites. The cellular mat, containing the parasites, is scrapped and passed through a 27G syringe. The preparation is centrifuged for 10 min at 1500 g. The supernatant is removed and the pellet re-suspended in a DMEM solution with 0.1M Sucrose, 0.1M Trehalose, 2.5% inulin, 0.1M GSH, 1% proline and 1% ectoin added. The solution is prepared extemporaneously on the day of vaccination. The exact concentration of parasites, as well as viability, is estimated by counting in flow cytometry parasites with or without propidium iodide (P4864-10ML, Sigma). The final prepared solution was diluted to contain 2·10⁷ parasites per millilitre.

[0782] Design of the Study

[0783] Mice were immunized intraperitoneally (IP) to DO with a single dose of 1·10⁷ tachyzoites of the Neo ncmic1-3 KO-2G strain. Control mice were inoculated by the vehicle. Two mice from each genetic background were inoculated per group, or four mice per group.

[0784] At D60, immunized mice were infected intraperitoneally at the lethal dose of 2·10⁷ tachyzoites of virulent strain Nc-1. Two criteria are used to evaluate vaccine efficacy, mortality rate evaluation and humoral response against Neospora caninum at 30 days after vaccination.

[0785] Animals

[0786] Eight C57BL/6 and Balb/C mice with EOPS (Specific Pathogen Free) status were included in the study (Janvier Labs, . . . ). They have been raised in ventilated racks in an A2 animal house, in full compliance with current European ethical and regulatory standards.

[0787] IgG Determination by ELISA

[0788] The production of total serum specific IgG of N. caninum was determined by ELISA. The total parasitic extract of the Nc-1 strain was diluted in 0.05M pH9.6 carbonate/bicarbonate buffer to obtain a final concentration of 10 μg/mL. 100 μL per well of this mixture were deposited on a plate 96 flat-bottomed wells (Nunc MaxiSorp). After one night at +4° C., the wells were washed three times with 300 μL PBS buffer, Tween 20 0.05% (v/v), then saturated with 200 μL PBS, Tween 20 0.05%, BSA 4% (w/v) for 1 h30 at 37° C. After 3 washes with 300 μL per PBS well, Tween 20 0.05%, 100 μL per serum well of interest, previously diluted 1/50th in PBS, Tween 20 0.05%, were deposited on the plate and diluted in cascade by series of 2 in 2 (deposit on 11 wells/serum of interest). In control, (i) a serum, diluted in the same way as before and for which the specific total IgG titration is known and important, will serve as the reference control and (ii) a pool of serum diluted to 1/50th from mice inoculated by vehicles will serve as the negative control. Finally, 100 μL of PBS, Tween 20 0.05% were also deposited in 8 wells to serve as a “white” control. After 1 h incubation at 37° C. and three washes with 300 μL per PBS well, Tween 20 0.05%, 100 μL per well of the secondary anti-Mouse IgG antibody coupled to alkaline phosphatase (Sigma A3562) and diluted 1/5000e in PBS-Tween 20 0.05% were deposited. After 1 hour of incubation at 37° C. and three washes with 300 μL per well of PBS, Tween 20 0.05% followed by three washes with 300 μL per well of H2O mQ, the revelation was performed by adding 100 μL per well of a disodium para-nitrophenyl phosphate (PnPP) (Sigma) solution diluted at 1 mg/mL in a 1M Diethanolamine-HCl pH9.8 buffer. After 60 minutes of incubation at +24° C. and protected from light, the absorbance was measured at λ=405 nm with a counter reading at λ=620 nm using a plate reader (Infinite M200 Pro NanoQuant, Tecam). The D.O. values were subtracted from the average D.O. of the “white” control. Neospora caninum specific total serum IgG levels were expressed as antibody titres. Two methods were used for titration. The IgG titre is the inverse of the highest dilution of the serum of interest with an O.D. at least 2.5 times greater than that obtained with the negative control, or with an O.D. of 0.2.

[0789] Results

[0790] The efficacy of Neo ncmic1-3 KO-2G was estimated on a lethal wall model.

[0791] Clinical Sign

[0792] After vaccination, the vaccinated animals showed no specific clinical signs, no weight alterations and no significant increase in body temperature, suggesting a good tolerance of mice to the Neo ncmic1-3 KO-2G strain.

[0793] Evaluation of the Humoral Response

[0794] At 30 days after vaccination, blood samples were taken and the specific IgG antibody titre was measured by ELISA to estimate the quality of the immune response post-vaccination. The results are presented in FIG. 12.

[0795] None of the unvaccinated mice showed a positive antibody titre. Conversely, all vaccinated mice, regardless of their genetic background, seroconverted and showed an antibody titre significantly different from that of unvaccinated animals.

[0796] Effectiveness of Vaccination on Mouse Survival

[0797] The real effectiveness of vaccination is assessed by an infectious challenge with a virulent strain (Nc-1). At D60 days after vaccination, mice were inoculated with the wild strain Nc-1 at a lethal dose of 2·10⁷ tachyzoites per animal. All mice that received the control solution died during the experiment, i.e. 100% of lethality. In contrast, 100% of vaccinated mice survived until the end of the experiment, sixty days later. In addition, none of these vaccinated mice showed significant clinical signs, suggesting a complete protective effect on both morbidity and mortality.

[0798] The results of this experiment demonstrate a clear immune response and protective effect of the Neo ncmic1-3 KO-2G-based vaccine against a lethal challenge with a wild Neospora caninum Nc-1 strain.

### EXAMPLE 7: EFFICACY STUDY OF THE TOXO TGMIC1-3 KO-2G STRAIN IN THE PREVENTION OF CONGENITAL TOXOPLASMOSIS IN A MOUSE MODEL

[0799] The main purpose of this study is to study the efficacy of the vaccine strain Toxo tgmic1-3 KO-2G against congenital toxoplasmosis in a mouse model.

[0800] Materials and Methods

[0801] Parasite Production Toxo Tgmic1-3 KO-2G

[0802] Toxo tgmic1-3 KO-2G strains are produced in human fibroblasts (HFF Hs27 ATCC CRL-1634) grown in minimal Dulbecco medium (DMEM) supplemented with 12% Australian fetal calf serum (SVF aust). The tachyzoites were collected from the supernatant. The parasites were listed on Malassez cell and diluted in DMEM medium to a concentration of 500 parasites per mL.

[0803] Design of the Study

[0804] Vaccination (100 tachyzoites in a volume of 200 μL of DMEM) is performed subcutaneously on female mice at DO with a 27G needle.

[0805] Before injection (D-2) and 28 days after injection, peripheral venous blood was collected and left at room temperature for a minimum of one hour. The serum was obtained by centrifugation at 5000 g for 10 minutes. The prepared seras were stored at −20° C.

[0806] Eight weeks after vaccination, 23 seroconverted mice (for T. gondii) per batch were placed in males and then challenged mid-pregnancy per os with 15 cysts of T. gondii strain 76K. The mothers are then isolated and the calving followed. The mice are followed for a period of about a month and then euthanized. A small number of mice will be analyzed after sacrifice. Then the mothers will be sacrificed, their spleens re-cultured to study the cellular response.

[0807] Animals

[0808] The number of mice per batch required for the study is 16 pregnant mice to allow a statistical study. The analysis of the immune response in 16 pregnant mice requires vaccinating a total of 50 mice per batch, taking into account the following parameters: gestation yield and potential mortality associated with the injection of the parasite (the mouse is an animal relatively sensitive to an injection of Toxoplasma gondii and vaccination to obtain effective seroconversion can generate mortality). Thus the vaccinated batches contain 50 animals at the beginning. Mice from batches 1 and 2 were not vaccinated, so 23 mice were sufficient for these batches. The analysis is performed on 16 pregnant mice per batch. The supernumerary mice are sacrificed.

TABLE 20
Distribution of animals in the different batches.

| | | | | Number of | |
|---|---|---|---|---|---|
| | | | Initial | people of | Number of |
| | | | number of | female | pregnant |
| | | | female | mice to | females |
| | Vaccination | challenge | mice | mate | required |
| Batch 1: non-vaccinated, non | — | — | 23 | 23 | 16 |
| challenged batch (control) | | | | | |
| Batch 2: non-vaccinated | — | Feeding | 23 | 23 | 16 |
| batch - challenged | | 15 cysts | | | |
| Batch 3: vaccinated | 100 tachyzoites Toxo | — | 50 | 23 | 16 |
| batch - not challenged | tgmic1-3 KO - 2G | | | | |
| Batch 4: vaccinated | 100 tachyzoites Toxo | Feeding | 50 | 23 | 16 |
| batch - challenged | tgmic1-3 KO - 2G | 15 cysts | | | |

[0809] A total of 146 8-week-old female SWISS mice were included in the study and distributed in different batches (Table 20). The animals were housed and handled in strict compliance with the ethical standards in force in France and the breeding standards imposed by European regulations. Food and drinking water have been distributed ad-libitum throughout the experiment.

[0810] After a period of 7 days of acclimatization, the mice were individually identified and randomly assigned to 4 groups.

[0811] IgG and IgM Assay by ELISA

[0812] A 96-well plate was adsorbed with protein extract from the RH strain of Toxoplasma gondii (10 μg/ml) diluted in carbonate buffer pH 9.6 overnight at 4° C. After 2 washes in PBS 1×/Tween 0.05% and one wash in PBS 1×, the plate was saturated with PBS 3% BSA for 1 h30 at room temperature. Then, for the titration, the series 2 dilutions of 2 of 2 in, in PBS+3% BSA of the murine compounds to be tested were removed.

[0813] After 1 h incubation at 37° C., the plate was washed twice (PBS 1×/Tween 0.05%), then the secondary antibody (anti-mouse IgG coupled to alkaline phosphatase (Sigma A3562) or anti-mouse IgM coupled to alkaline phosphatase (Sigma A9688) is added and diluted to 1/30 000 to PBS 1×/Tween 0.05%, before a new incubation at 37° C. for 1 h30. After 2 washes in PBS 1×/Tween 0.05% and one wash in PBS 1×, pNPP (4-Nitrophenyl phosphate disodium salt hexahydrate) was used at a concentration of 1 mg/ml diluted in DEA-HCL buffer for revelation, and the plate was incubated for 15 to 20 minutes at room temperature. The reaction is stopped with the addition of 3N NaOH stop solution. The absorbance at 405 nm was read via the Infinite Nanoquant Plate Reader M200 PRO (TECAN).

[0814] ELISA Determination of IFN-γ Secreted by Splenocytes Stimulated In Vitro

[0815] After each sampling, the spleen was crushed on a 100 μm sieve placed above a 50 ml Falcon tube with the addition of 5 ml RPMI medium. The shred was then centrifuged for 10 min at 400 g. The pellet was taken up in 300 μl RPMI and then 1 ml lysis buffer was added. The tube was incubated for 3 min at 4° C., and the reaction was stopped with the addition of 2% excess PBS 1×/SVF, then the cells were centrifuged for 10 min at 400 g. The cell pellets obtained were then taken up in 5 ml of stimulation medium. The cells were enumerated on Malassez cells in the presence of trypan blue which colours the dead cells.

[0816] The cells were cultured in 96 wells in plates at a rate of 5′¹⁰⁵ cells/well. Different stimulants could be added: antigenic extracts of the RH strain of Toxoplasma gondii (10 μg/ml) or concanavalin A (5 μg/ml) as positive controls. The plates were cultured in an oven at 37° C., 5%_{CO2} for 72 hours.

[0817] The IFN-γ assay was performed on splenocyte culture supernatants in the presence of these different stimulants. The assay was performed by an ELISA test according to the protocol of the kit “Mouse IFN-γ ELISA Ready-set-go® (Ebiosciences).

[0818] Evaluation of the Number of Cysts Present in the Brains of Mice

[0819] The brains of mothers and mice are sampled to determine the presence or absence of brain cysts. Following the sacrifice of the mice, the brains are removed and crushed. The number of cysts is then counted by microscopic observation of the entire brain crushed material.

[0820] Results

[0821] Effectiveness of Vaccination on Mother Mice

[0822] Survival and Clinical Signs Following Vaccination with the Toxo Tgmic1-3 KO-2G Strain

[0823] Mice are observed daily from vaccination (DO) until 33rd day after vaccination and clinical signs are noted. An overall clinical score is calculated according to Table 21 of the sign score table. The results are presented in FIG. 13-A.

TABLE 21
Scoreboard of clinical signs observed for mice

| | Score/2 |
|---|---|
| Physical appearance | |
| Normal | 0 |
| Brushed hair | 1 |
| Severe piloting | 2 |
| Behaviour/mobility | |
| Normal | 0 |
| Slight prostration/reduced mobility | 1 |
| Immobile | 2 |
| Weight | |
| <10% loss | 0 |
| 10% to 20% loss | 1 |
| >20% loss | 2 |
| Injury at the injection site | |
| No injury | 0 |
| Papule/redness | 1 |
| Ulceration/necrosis | 2 |

[0824] Mice from unvaccinated batches did not show clinical signs, while mice from vaccinated batches showed some moderate clinical signs with a clinical score of less than 2. The peak of clinical signs was observed on D18. These clinical signs were observed up to D33. Mortality in SWISS mice can be observed depending on the injection site and parasitic strains of mortality. A survival rate of 90% (10 dead mice/100 mice for batches 3 and 4) is obtained at D30 for vaccination of mice with the Toxo tgmic1-3 KO-2G strain.

[0825] Evaluation of the Adaptive Humoral Response

[0826] The determination of serum IgG against Toxoplasma gondii proteins shows very clearly that the serum IgG from mice before injection does not produce antibodies specific to this strain.

[0827] Vaccination with the Toxo tgmic1-3 KO-2G strain allows a high IgG production at D28 (batch 3 and 4) and J129 (batch 3). As expected, the challenge (strain 76K) of unvaccinated mice (batch 2) also allows IgG production. The production of IgG for the vaccinated batch is reinforced by the challenge (batch 4 to D129). The results are presented in FIG. 13-B.

[0828] Evaluation of the Specific Cellular Response

[0829] In order to evaluate the development of a cellular immune response, IFN-γ (cytokine indicating the development of a Th1-type response) secreted in splenocyte culture supernatants following various stimuli, was measured 72 hours after culture.

[0830] As expected, the concentration of IFN-γ is increased after a challenge compared to the control group. For all mice vaccinated with Toxo tgmic1-3 KO-2G (having been challenged (batch 4) or not (batch 3)), significant concentrations of IFN-γ are measured when the cells are stimulated with antigenic extracts of the RH strain of Toxoplasma gondii, compared to unvaccinated mice. This suggests a vaccination-induced cellular response. The results are presented in FIG. 13-C.

[0831] Counting the Number of Cysts Present in the Brains of Mother Mice

[0832] The mothers were sacrificed on D129. The number of cysts is obtained by microscopic observation of the entire brain crushed material (4 brains per batch). No cysts are detected for batch 1 (unvaccinated, not challenged) while after challenge, an average of 2250.75 cysts per brain is obtained for batch 2 (unvaccinated, challenged). In batch 3 (only vaccinated), a very small number of cysts are observed (0.75 cysts per brain). In batch 4 (vaccinated and challenged), there was a significant decrease in the number of cysts compared to the unvaccinated batch (batch 2), with an average of 52 cysts per brain.

[0833] Mice vaccinated with the Toxo tgmic1-3 KO-2G strain form very few brain cysts following a challenge with the T. gondii 76K strain. The results are presented in FIG. 13-D.

[0834] Effectiveness of Vaccination on Mice

[0835] Effectiveness on Proliferation and Sex Ratio

[0836] Similar prolificity was obtained for all groups showing that vaccination and/or challenge did not affect the number of mice per litter. On the other hand, a change in sex ratio after T. gondii infection has already been described (Kankova et al, parasitology 2007). We observe a reduced number of males in the control group after challenge while this is not observed for the vaccinated group, suggesting that vaccination prevents sex ratio change. The results are presented in FIGS. 13-E and 13-F.

[0837] Effectiveness on Stillbirths and Mortality

[0838] Stillbirths and deaths were increased following the challenge in the absence of vaccination (batch 2 compared to batch 1). For the vaccinated batch only (batch 3), stillbirth and mortality are at a very low level, close to the control group (batch 1). The vaccinated and challenged group (batch 4) shows a significant reduction in the number of stillbirths and mortality compared to the unvaccinated and challenged group (batch 2). Vaccinating mothers therefore protects the offspring from an increase in stillbirths and mortality following a challenge. The results are presented in FIGS. 13-G and 13-H.

[0839] Effectiveness on Mouse Survival

[0840] The mice were followed over a 32-day period to study the effectiveness of the vaccination. Survival of mice decreases significantly for the batch whose mothers were challenged but not vaccinated. The other groups have a survival rate close to that obtained for the control batch (batch 1). Vaccinating mothers therefore increases the survival rate of mice following a challenge during gestation. The results are presented in FIG. 13-I.

[0841] Effectiveness on the Clinical Signs of Mice.

[0842] Mice are observed daily for 30 days and clinical signs are noted. An overall clinical score is calculated according to the sign score table (see Table 22 below).

TABLE 22
Scoreboard of clinical signs observed for mice

| | Score/2 |
|---|---|
| Mobility | |
| Normal | 0 |
| Limited | 1 |
| Immobile | 2 |
| | Score/1 |
| Isolation | |
| No isolation | 0 |
| Isolation of | 1 |
| mother/nest/mice | |
| Growth | |
| Normal | 0 |
| Slower growth | 1 |

[0843] The mice from the challenged group (batch 2) have a higher clinical score than the mice from the control group (batch 1). This clinical score is due in particular to a slower growth of mice in this group. For the other batches (vaccinated or vaccinated and challenged), the clinical score is similar to the control group. The vaccination of mothers prevented growth retardation induced by the challenge in mice. The results are presented in FIG. 13-J.

[0844] Evaluation of the Immature Humoral Response: IgM

[0845] IgM cannot pass through the placental barrier but could pass to offspring via breast milk. Since IgM has a half-life of 5 days, the 32-day IgM assay reflects the immunity of mice developed in response to T. gondii (vaccine or challenge strain) transmitted by the mother. The humoral response developed by mice (in response to vaccination or the mother's challenge) is therefore evaluated by ELISA assay of IgM immunoglubulin at 32 days of age. The results are presented in FIG. 13-K.

[0846] The IgM titre is increased for mice in the group from challenged mice (batch 2) compared to those from non-challenged mice (batch 1). For the vaccinated group only (batch 3), the IgM titre is close to the detection limit, indicating that there is no vertical transmission from the strain to the mice. For the vaccinated and challenged group (batch 4), the IgM titre measured for mice is significantly reduced compared to the titre obtained for mice from the challenged group (batch 2). Vaccination of mice has thus made it possible to reduce vertical transmission from the challenge strain to mice.

[0847] The Toxo tgmic1-3 KO-2G strain thus allowed the implementation in mice of a humoral and cellular immune response directed against the T. gondii parasite. Vaccination of mice with the Toxo tgmic1-3 KO-2G strain resulted in a significant decrease in the cerebral parasitic load observed after a challenge with the virulent 76K strain. In addition, the Toxo tgmic1-3 KO-2G strain has good safety.

[0848] Finally, the Toxo tgmic1-3 KO-2G strain allowed to protect the offspring from congenital toxoplasmosis (after a challenge with the virulent 76K strain at mid-gestation) with a decrease in stillbirth and mortality, a better clinical score for mice.

### EXAMPLE 8: SAFETY AND IMMUNOGENICITY STUDY OF TOXO TGMIC1-3 KO-2G STRAINS EXPRESSING THE M2EGPI ANTIGEN OF INFLUENZA VIRUS IN A MOUSE MODEL

[0849] The objective of this experiment is to determine whether the Toxo tgmic1-3 KO-2G strain expressing the M2eGPI antigen of Influenza virus provides a humoral and cellular immune response to the Toxoplasma gondii vector and against the targeted viral antigen.

[0850] Material and Method

[0851] Production of Toxo Tgmic1-3 KO-2G Parasites Expressing the Influenza Virus M2eGPI Antigen

[0852] Toxo tgmic1-3 KO-2G strains expressing influenza virus antigen (Toxo tgmic1-3 KO-2G M2eGPI LoxP, Toxo tgmic1-3 KO-2G M2eGPI LoxN and Toxo tgmic1-3 KO-2G M2eGPI total population-random insertion—example 4) are produced in human fibroblasts (HFF Hs27 ATCC CRL-1634) grown in minimal medium of Dulbecco (DMEM) supplemented by 10% fetal calf serum (SVF), 2 mM glutamine, 100 U/mL penicillin and 100 U/mL streptomycin. The tachyzoites were collected after mechanical lysis of the host cells by 3 passages in 25G syringes. The parasites were listed on Malassez cell and diluted in DMEM medium to a concentration of 500 parasites per mL.

[0853] Animals

[0854] A total of 45 6-week-old female SWISS mice were included in the study. The animals were housed and handled in strict compliance with the ethical standards in force in France and the breeding standards imposed by European regulations. Food and drinking water were distributed ad-libitum throughout the experiment.

[0855] After a 15-day acclimatization period, the mice were individually identified and randomly assigned to 5 groups.

[0856] Batch 1: Toxo tgmic1-3 KO-2G (n=10)

[0857] Batch 2: Toxo tgmic1-3 KO-2G M2eGPI LoxP (n=10)

[0858] Batch 3: Toxo tgmic1-3 KO-2G M2eGPI LoxN (n=10)

[0859] Batch 4: Toxo tgmic1-3 KO-2G M2eGPI total population-random insertion (n=10)

[0860] Batch 5: naive (n=5)

[0861] At D0, 100 tachyzoites were injected intraperitoneally into a volume of 200 μL of DMEM. The animals were then followed and sacrificed 5 weeks after injection (J35) and the rats were collected. Before (D-1) and 34 days after injection, peripheral venous blood was collected and left at room temperature for a minimum of 30 minutes. The serum was obtained by centrifugation at 3000 g for 10 minutes. The prepared seras were stored at −20° C.

[0862] IgG Determination by ELISA

[0863] A 96-well plate was adsorbed with a mixture of 4 synthetic M2e peptides at 10 μg/mL (Anaspec) corresponding to the 4 M2e present in the construction of the fusion protein sag1M2eGPÏ or the protein extract of Toxo tgmic1-3 KO-2G (10 μg/ml) diluted in carbonate buffer pH 9.6 overnight at 4° C. After washing with PBS 1×/Tween 0.05%, the plate was saturated with PBS 1×/Tween 0.05%-BSA 4% for 1 h30 at 37° C. Then, for the titration, the series 2 dilutions of 2 of 2 in, in PBS 1×/Tween 0.05% of the murine samples to be tested were removed. After 1 h incubation at 37° C., the plate was washed, then the secondary antibody (IgG anti-mouse IgG coupled to alkaline phosphatase) is added and diluted to 1/30 000 PBS 1×/Tween 0.05%, before further incubation at 37° C. for 1 h30. After washing, pNPP was used at a concentration of 1 mg/ml diluted in DEA-HCL buffer for revelation, and the plate was incubated for 1 h at 37° C. The absorbance at 405 nm of each well with a counter reading at 620 nm was read via the Infinite Nanoquant Plate Reader M200 PRO (TECAN).

[0864] ELISA Determination of IFN-□ Secreted by Splenocytes Stimulated In Vitro

[0865] After each sampling, the spleen was crushed on a 100 μm sieve placed above a 50 ml Falcon tube with the addition of 5 ml RPMI medium. The shred was then centrifuged for 10 min at 400 g. The pellet was taken up in 300 μl RPMI and then 1 ml lysis buffer was added. The tube was incubated for 3 min at 4° C., and the reaction was stopped with the addition of 2% excess PBS 1×/SVF, then the cells were centrifuged for 10 min at 400 g. The cell pellets obtained were then taken up in 5 ml of stimulation medium. The cells were enumerated on Malassez cells in the presence of trypan blue which colours the dead cells.

[0866] The cells were cultured in 96 wells in plates at a rate of 5′¹⁰⁵ cells/well. Different stimulants could be added: antigenic extracts of Toxo tgmic1-3 KO-2G (10 μg/ml), a mix of 4 synthetic M2e peptides at 10 μg/mL (Anaspec) corresponding to the 4 M2e present in the construction of the fusion protein sag1M2eGPI or concanavaline A (5 μg/ml) which serves as positive control. The plates were cultured in an oven at 37° C., 5%_{CO2} for 72 hours. The IFN-γ assay was performed on splenocyte culture supernatants in the presence of different stimulants. The assay was performed by an ELISA test according to the protocol of the kit “Mouse IFN-γ ELISA Ready-set-go® (Ebiosciences).

[0867] Results

[0868] Survival and Clinical Signs

[0869] Most mice show clinical signs such as tousled hair, swelling of the abdomen and prostration, with the exception of mice that have not received parasitic strains.

[0870] Evaluation of the Adaptive Humoral Response to the Vector Toxo Tgmic1-3 KO-2G

[0871] The determination of serum IgG against Toxo tgmic1-3 KO-2G proteins shows very clearly that they will come from mice before injection and do not produce antibodies specific to this strain. Concerning the samples will be collected 34 days after injection, a strong increase in absorbance synonymous with mouse seroconversion following vaccination with Toxo tgmic1-3 KO-2G or one of the derived strains is observed. A large majority of mice are seroconverted for toxoplasmosis.

[0872] Evaluation of the Adaptive Humoral Response to the M2e Influenza Antigen

[0873] Following the injection of Toxo tgmic1-3 KO-2G strains expressing M2eGPI, antibodies specific to the M2e antigen expressed by Toxo tgmic1-3 KO-2G M2eGPI LoxP, Toxo tgmic1-3 KO-2G M2eGPI LoxN and Toxo tgmic1-3 KO-2G M2eGPI total population-random insertion, but no production of antibodies specific for the M2e antigen for the Toxo tgmic1-3 KO-2G strain.

[0874] The expression of the M2eGPI transgene being similar or slightly higher for clones with a targeted insertion of the transgene (located at the LoxP and LoxN scars) than for populations with a random insertion of the transgene (example 4), a similar or slightly better adaptive humoral response to the antigen is obtained for Toxo tgmic1-3 KO-2G M2eGPI LoxP, Toxo tgmic1-3 KO-2G M2eGPI LoxN strains than for populations where the transgene is randomly inserted.

[0875] Evaluation of the Specific Cellular Response of Toxo Tgmic1-3 KO-2G or Influenza M2e Antigen

[0876] In order to evaluate the development of a cellular immune response, IFN-γ (cytokine indicating the development of a Th1-type response) secreted in splenocyte culture supernatants following various stimuli, was measured 72 hours after culture.

[0877] For all mice vaccinated with Toxo tgmic1-3 KO-2G or Toxo tgmic1-3 KO-2G M2eGPI (targeted insertion in LoxP, LoxN or randomly integrated), significant concentrations of IFN-γ are measured when the cells are stimulated with antigenic extracts of Toxo tgmic1-3 KO-2G, compared to unvaccinated mice.

[0878] Concerning cells restimulated with M2e, no production of IFN-γ is detectable for all mice, whether naïve, vaccinated with Toxo tgmic1-3 KO-2G or with Toxo tgmic1-3 KO-2G M2eGPI (targeted insertion in LoxP, LoxN or random integration).

[0879] It was therefore observed the implementation of a humoral immune response to the M2eGPI construction and a humoral and cellular immune response directed against the vector Toxo tgmic1-3 KO-2G.

1-15. (canceled)

16. A mutant Sarcocystidae strain in which the two genes mic1 and mic3 are deleted containing two sites of specific recombination of an enzyme allowing specific recombination, said specific recombination sites being at the respective locus of each of the said deleted genes, the site of specific recombination of the enzyme allowing specific recombination at the locus of the deleted mic1 gene being different to that at the locus of the deleted mic3 gene.

17. The mutant strain according to claim 16, wherein said mutant strain is a strain of the genus Neospora spp.

18. The mutant strain according to claim 16, wherein said mutant strain is a strain of the species Neospora caninum.

19. The mutant strain according to claim 16, wherein said mutant strain is a strain of the genus Toxoplasma spp.

20. The mutant strain according to claim 16, wherein said mutant strain is a strain of the species Toxoplasma gondii.

21. The mutant strain according to claim 16, wherein both mic1 and mic3 genes are deleted, containing two specific recombination sites of an enzyme allowing specific recombination, at the respective locus of each of said deleted genes, the specific recombination site of the enzyme allowing specific recombination, at the locus of the deleted mic1 gene being different from that at the locus of the deleted mic3 gene, and not containing heterologous DNA, other than heterologous DNA corresponding to the specific recombination sites of the enzyme allowing specific recombination, at the respective locus of each of the said deleted genes.

22. The mutant strain according to claim 16, wherein both mic1 and mic3 genes are deleted, containing two specific recombination sites of an enzyme allowing specific recombination, at the respective locus of each of said deleted genes, the specific recombination site of the enzyme allowing specific recombination, at the locus of the deleted mic1 gene being different from that at the locus of the deleted mic3 gene, and not containing heterologous DNA, other than heterologous DNA corresponding to the specific recombination sites of the enzyme allowing specific recombination, at the respective locus of each of the said deleted genes,
said enzyme allowing a specific recombination being the Cre-recombinase, and the specific recombination sites of Cre-recombinase at the respective locus of each of said deleted genes being selected from: LoxN of SEQ ID NO: 5, LoxP of SEQ ID NO: 12 and Lox2272 of SEQ ID NO: 68.

23. The mutant strain according to claim 16, said strain containing heterologous DNA at the locus of the deleted mic1 gene or at the locus of the deleted mic3 gene, different from heterologous DNA corresponding to the enzyme-specific recombination sites allowing recombination specific to the respective locus of each of said deleted genes,
said heterologous DNA being flanked:
a first enzyme-specific recombination site allowing specific recombination, corresponding to the enzyme-specific recombination site allowing specific recombination at the locus of the deleted mic1 gene or the locus of the deleted mic3 gene and,
a second specific recombination site identical to said first specific recombination site, corresponding to the enzyme-specific recombination site allowing specific recombination, at the locus of the deleted mic1 gene or the locus of the deleted mic3 gene and,
and the means necessary for its transcription.

24. The mutant strain according to claim 16, said strain containing heterologous DNA at the locus of the deleted mic1 gene or at the locus of the deleted mic3 gene, different from heterologous DNA corresponding to the specific recombination sites of the enzyme allowing recombination specific to the respective locus of each of said deleted mic1 and mic3 genes, said heterologous DNA coding for a protein and being flanked:
a first enzyme-specific recombination site allowing specific recombination, corresponding to the enzyme-specific recombination site allowing specific recombination at the locus of the deleted mic1 gene or the locus of the deleted mic3 gene and,
a second specific recombination site identical to said first specific recombination site, corresponding to the enzyme-specific recombination site allowing specific recombination, at the locus of the deleted mic1 gene or the locus of the deleted mic3 gene and,
and the means necessary for the protein expression of the said heterologous DNA,
said enzyme allowing specific recombination being Cre-recombinase and the specific recombination sites of Cre-recombinase being chosen from: LoxN of SEQ ID NO: 5, LoxP of SEQ ID NO: 12 and Lox2272 of SEQ ID NO: 68.

25. The mutant strain according to claim 16, containing heterologous DNA at the locus of the deleted mic1 gene or at the locus of the deleted mic3 gene, different from heterologous DNA corresponding to the specific recombination sites of an enzyme allowing specific recombination, said enzyme being the Cre-recombinase, at the respective locus of each of the said mic1 and mic3 genes deleted
and containing three specific recombination sites which are respectively:
site A corresponding to the specific recombination site of the
Cre-recombinase at the locus of the deleted mic1 gene,
site B corresponding to the specific recombination site of Cre-recombinase at the locus of the deleted mic3 gene, and
site C corresponding to said second specific recombination site which flanks said second heterologous DNA identical to said first specific recombination site, said first Cre-recombinase specific recombination site corresponding to said Cre-recombinase specific recombination site at the locus of the deleted mic1 gene (site A) or said Cre-recombinase specific recombination site at the locus of the deleted mic3 gene (site B)
said three specific recombination sites A, B and C being selected from the following sites: LoxN of SEQ ID NO: 5, LoxP of SEQ ID NO: 12 and Lox2272 of SEQ ID NO: 68, so that
said site A and said site B are different, and
said site C is identical to said site A or said site B.

26. The mutant strain according to claim 16, containing heterologous DNA at the locus of the deleted mic1 gene or at the locus of the deleted mic3 gene, different from heterologous DNA corresponding to the specific recombination sites of an enzyme allowing specific recombination, said enzyme being the Cre-recombinase, at the respective locus of each of the said mic1 and mic3 genes deleted
and containing three specific recombination sites which are respectively:
site A corresponding to the specific recombination site of the
Cre-recombinase at the locus of the deleted mic1 gene,
site B corresponding to the specific recombination site of Cre-recombinase at the locus of the deleted mic3 gene, and
site C corresponding to said second specific recombination site which flanks said second heterologous DNA identical to said first specific recombination site, said first Cre-recombinase specific recombination site corresponding to said Cre-recombinase specific recombination site at the locus of the deleted mic1 gene (site A) or said Cre-recombinase specific recombination site at the locus of the deleted mic3 gene (site B)
said three specific recombination sites A, B and C being selected from the following sites: LoxN of SEQ ID NO: 5, LoxP of SEQ ID NO: 12 and Lox2272 of SEQ ID NO: 68, so that
said site A and said site B are different, and
said site C is identical to said site A or said site B;
such as
said site A is the LoxN site of SEQ ID NO: 5
said site B is the LoxP site of SEQ ID NO: 12, and
said site C is the LoxN site of SEQ ID NO: 5, said first specific recombination site of Cre-recombinase being site A;
or such as
said site A is the LoxN site of SEQ ID NO: 5
said site B is the LoxP site of SEQ ID NO: 12, and
said site C is the LoxP site of SEQ ID NO: 12, said first specific recombination site of Cre-recombinase being site B,
or such as
said site A is the LoxP site of SEQ ID NO: 12
said site B is site LoxN of SEQ ID NO: 5, and
said site C is the LoxP site of SEQ ID NO: 12, said first specific recombination site of Cre-recombinase being site A;
or such as
said site A is the LoxP site of SEQ ID NO: 12
said site B is site LoxN of SEQ ID NO: 5, and
said site C is the LoxN site of SEQ ID NO: 5, said first specific recombination site of Cre-recombinase being site B.

27. The mutant strain according to claim 16, wherein said mutant strain is a mutant strain of Toxoplasma spp.,
and wherein the rop16I gene is deleted and contains an enzyme-specific recombination site allowing locus-specific recombination of said deleted rop16I gene, said site being different from said specific recombination site located at the locus of the deleted mic1 gene and said specific recombination site located at the locus of the deleted mica gene
and said mutant strain comprising a gene encoding the protein GRA15II, as well as the means necessary for the expression of said protein at the locus of said deleted rop16I gene,
said gene encoding the protein GRA15II at the locus of said deleted rop16I gene, being flanked upstream by said enzyme-specific recombination site allowing locus-specific recombination of said deleted rop16I gene.

28. The mutant strain according to claim 16, wherein said mutant strain is a mutant strain of Toxoplasma spp.,
and wherein the rop16I gene is deleted and contains an enzyme-specific recombination site allowing locus-specific recombination of said deleted rop16I gene, said site being different from said specific recombination site located at the locus of the deleted mic1 gene and said specific recombination site located at the locus of the deleted mica gene
and said mutant strain comprising a gene encoding the protein GRA15II, as well as the means necessary for the expression of said protein at the locus of said deleted rop16I gene,
said gene encoding the protein GRA15II at the locus of said deleted rop16I gene, being flanked upstream by said enzyme-specific recombination site allowing locus-specific recombination of said deleted rop16I gene, in which said enzyme allowing specific recombination is Cre-recombinase, and said specific recombination site of an enzyme allowing locus-specific recombination of said deleted rop16I gene is a specific recombination site of Cre-recombinase chosen from the following sites: LoxN of SEQ ID NO: 5, LoxP of SEQ ID NO: 12 and Lox2272 of SEQ ID NO: 68,
this specific recombination site being different from the specific recombination sites of Cre-recombinase at the locus of the deleted mic1 gene and at the locus of the deleted mic3 gene, said strain containing three specific recombination sites which are respectively:
site A corresponding to the specific recombination site of the Cre-recombinase at the locus of the deleted mic1 gene
site B corresponding to the specific recombination site of Cre-recombinase at the locus of the deleted mic3 gene, and
site D corresponding to the specific recombination site of the Cre-recombinase at the locus of said deleted rop16I gene
such as
said site A is the LoxN site of SEQ ID NO: 5,
said site B is the LoxP site of SEQ ID NO: 12,
said site D is the Lox2272 site of SEQ ID NO: 68.

29. The mutant strain according to claim 16, wherein said mutant strain is a mutant strain of Toxoplasma spp., said enzyme allowing specific recombination is Cre-recombinase, in which the rop16I gene is deleted and said strain contains a specific recombination site of the Cre-recombinase, at the locus of said deleted rop16I gene,
said strain containing four specific recombination sites which are respectively:
site A corresponding to the specific recombination site of the Cre-recombinase at the locus of the deleted mic1 gene
site B corresponding to the specific recombination site of Cre-recombinase at the locus of the deleted mic3 gene, and
the site C corresponding to said second specific recombination site which flanks said heterologous DNA identical to said first specific recombination site, said first Cre-recombinase specific recombination site corresponding to said Cre-recombinase specific recombination site at the locus of the deleted mic1 gene (site A) or said Cre-recombinase specific recombination site at the locus of the deleted mica gene (site B)
site D corresponding to the specific recombination site of the Cre-recombinase at the locus of said deleted rop16I gene
such as
said site A is the LoxN site of SEQ ID NO: 5
said site B is the LoxP site of SEQ ID NO: 12,
said site C is the LoxN site of SEQ ID NO: 5, said first specific recombination site of Cre-recombinase being site A, and
said site D is the Lox2272 site of SEQ ID NO: 68;
or such as
said site A is the LoxN site of SEQ ID NO: 5
said site B is the LoxP site of SEQ ID NO: 12,
said site C is the LoxP site of SEQ ID NO: 12, said first specific recombination site of Cre-recombinase being site B, and
said site D is the Lox2272 site of SEQ ID NO: 68.

30. The mutant strain according to claim 16, wherein said heterologous DNA encodes an immunogenic heterologous antigen of virus, parasite or bacterium.

31. The mutant strain according to claim 16, wherein said heterologous DNA consists of the nucleotide sequence SEQ ID NO: 173, encoding the influenza virus antigen SEQ ID NO: 167

32. The mutant strain according to claim 16, wherein said mutant strain is a strain of Toxoplasma gondii selected from
a strain in which
the mic1 gene and the mic3 gene are deleted and wherein the specific recombination site of the Cre-recombinase at the locus of the deleted mic1 gene is the LoxN site of SEQ ID NO: 5 and
the specific recombination site of Cre-recombinase at locus of the deleted mic3 gene is the LoxP site of SEQ ID NO: 12.
a strain in which the mic 1 gene, the mic 3 gene and the rop16I gene are deleted, and comprising a gene encoding the protein GRA15II, as well as the means necessary for the expression of said protein, at the locus of said deleted rop16I gene,
said gene encoding the protein GRA15II at the locus of said deleted rop16I gene, being flanked upstream by a specific recombination site of the Cre-recombinase,
in which
the specific recombination site of Cre-recombinase at the locus of the deleted mic1 gene is the LoxN site of SEQ ID NO: 5, and
the specific recombination site of Cre-recombinase at the locus of the deleted mic3 gene is the LoxP site of SEQ ID NO: 12, and
said Cre-recombinase specific recombination site which upstream flanks said gene encoding the GRA15II protein at the locus of the deleted rop16I gene, is the Lox2272 site of SEQ ID NO: 68.

33. The mutant strain according to claim 16, wherein said mutant strain is a Neospora caninum strain and wherein the mic1 gene and the mic3 gene are deleted and wherein
the specific recombination site of Cre-recombinase at the locus of the deleted mic1 gene is the LoxP site of SEQ ID NO: 12 and
the specific recombination site of Cre-recombinase at the locus of the deleted mic3 gene is the LoxN site of SEQ ID NO: 5.

34. A method for the targeted insertion of heterologous DNA using a mutant strain according to claim 16, not containing heterologous DNA different from heterologous DNA corresponding to the specific recombination sites of Cre-recombinase at the respective locus of each of said deleted genes.

35. A mutant strain of Toxoplasma spp. wherein the genes mic1, mic3 and rop16I are deleted, containing three Cre-recombinase specific recombination sites, at the respective locus of each of said deleted genes, the Cre-recombinase specific recombination site, at the locus of the deleted mic1 gene being different from that at the locus of the deleted mic3 gene and the recombination site specific to the locus of the deleted rop16I gene being different from the recombination sites specific to the loci of the deleted mic1 and mic3 genes and said strain containing DNA heterologous to the locus of the deleted mic1 gene or the locus of the deleted mic3 gene or the locus of the deleted rop16I gene, said heterologous DNA being different from heterologous DNA corresponding to the specific recombination sites of the Cre-recombinase, at the respective locus of each of the deleted mic1, mic3 and rop16I genes,
in such a way that:
when said heterologous DNA is inserted at the locus of the deleted mic1 gene, it is flanked:
a first Cre-recombinase-specific recombination site, corresponding to a Cre-recombinase-specific recombination site, at the locus of the deleted mic1 gene (site A), and
a second Cre-recombinase specific recombination site (site C), identical to the first Cre-recombinase specific recombination site located at the locus of the deleted mic1 gene (site A),
when said heterologous DNA is inserted at the locus of the deleted mic3 gene, it is flanked:
a first Cre-recombinase-specific recombination site, corresponding to a Cre-recombinase-specific recombination site, at the locus of the deleted mic3 gene (site B), and
a second Cre-recombinase specific recombination site (site C), identical to the first Cre-recombinase specific recombination site located at the locus of the deleted mic3 gene (site B),
when said heterologous DNA is inserted at the locus of the deleted rop16I gene, it is flanked:
a first Cre-recombinase-specific recombination site, corresponding to a Cre-recombinase-specific recombination site, at the locus of the deleted rop16I gene (site D), and
a second Cre-recombinase specific recombination site (site C), identical to the first Cre-recombinase specific recombination site located at the locus of the deleted rop16I gene (site D),
said strain comprising the elements necessary for the transcription of said heterologous DNA, or the means necessary for the expression of said heterologous DNA when said heterologous DNA encodes at least one protein,
said mutant strain then containing four specific recombination sites of the Cre-recombinase defined as follows:
site A corresponding to said specific recombination site of the Cre-recombinase at the locus of the deleted mic1 gene
site B corresponding to said specific recombination site of the Cre-recombinase at the locus of the deleted mic3 gene, and
site C corresponding to a specific recombination site of the Cre-recombinase at the locus of the deleted mic1 gene (site A) when heterologous DNA is inserted at the locus of the deleted mic1 gene or corresponding to a specific recombination site of Cre-recombinase at the locus of the deleted mic3 gene (site B) when heterologous DNA is inserted at the locus of the deleted mic3 gene, or corresponding to a specific recombination site of Cre-recombinase at the locus of the deleted rop16I gene (site D) when heterologous DNA is inserted at the locus of the deleted rop16I gene
site D corresponding to said specific recombination site of the Cre-recombinase at the locus of said deleted rop16I gene
such as, when heterologous DNA is inserted at the locus of the deleted mic1 gene,
said site A corresponds to a LoxN site of SEQ ID NO: 5
said site B corresponds to a LoxP site of SEQ ID NO: 12
said site C corresponds to a LoxN site of SEQ ID NO: 5
said site D corresponds to a Lox2272 site of SEQ ID NO: 68;
or such as when heterologous DNA is inserted at the locus of the deleted mica gene,
said site A corresponds to a LoxN site of SEQ ID NO: 5
said site B corresponds to a LoxP site of SEQ ID NO: 12
said site C corresponds to a LoxP site of SEQ ID NO: 12
said site D corresponds to a Lox2272 site of SEQ ID NO: 68;
or such as when heterologous DNA is inserted at the locus of the deleted rop16I gene,
said site A corresponds to a LoxN site of SEQ ID NO: 5
said site B corresponds to a LoxP site of SEQ ID NO: 12
said site C corresponds to a Lox2272 site of SEQ ID NO: 68
said site D corresponds to a Lox2272 site of SEQ ID NO: 68.

The application's sequence listing, which the Patent Office published only in electronic form, follows.

SEQUENCE LISTING (231 sequences)

SEQ ID NO: 1 - DNA, 10063 bp, artificial sequence
  plasmid
ccatgtgaatatgctttaaccgtgacagcgttcgtgtaagaccgttgatacgtggcacaagaacggcccaacttggtgagatgcgctggcgaacccgttgcattcacgcgggaggcataagtcgcctggagggcgcataggagcgggaggtttgcagcgctgtgtatttcgctgccgcatgggaagttgaatccagtggtgtgaggattggcgtacacatttccgtccacgctcggtctgtaaaaagccttttcatagctagtagtgaatacgtgtccattccgcatttgcggcgcgcgtgtggttcctgcgtctgcgacagtgactttcctgtcgatccgaatacggtcaggatattgaaatccaacagggctgttgtttgattcgcgtgtttctgttcgcaccttgttcttgcatgtgggctctttcgttctttggtcgattttctcaggatccctcgactgcacagtcaagctctggagctgtaatcgtgctcagcagatggaactggcggagaaggagttgaaaggagatggacctgcgtgaagtagcgcctcccccgttcgctttaagcttttccgtcagatccacccgtttcctatgctattttcgatgcgctttcagttcgacttccctggttttcttcgaattcgcaccgtctcccaatgcaccagtcttttcacctcttttctagcatcttctgttttggggggtcgggcggcgcagggcgtcccccagtcacagtagtcggcagaggtacgcgccgcgtccacgcagaggtcttcttcctggtgggtgcatagggatgcatgtgctttttagagttgcatgcgtgtgttttcccatttgtggatatacgtacatgcatatgtgcacgcgctcgcaaatttatgggataggcattcgacaaacacaccgtaggaacgccatctgatgccaccaacggagcagtgtagagctgaatattcctgtccctcgtatgtactgaacgaaactaatctattgtcgccgcaatagcgagaaggtaacttgaggtgcacagactggagggaggcataacggaaacatttcatcagaagccttcacacggcgaaggtgcgaaaattcccgtgcctccttttttcccacatctgcgattccaaattcgtgactcccctacctcgcgcatccgttaaaggcaacgttctcaccagtacacggaagcaaacgtccgcatacacttctctttgagaagggggatcgtaaaaggccccgaaaaatcctacagttccctcgttcttcgcaccgcagccagcacaaaatgcaggaagcagagagccgcgggaagggcaagtgacatatgagatgtgtgtcgcgaactgatggcttcggcccatcttcgccgtcgtattgaacagagttttctggccacgcgaaaagcacggcgaagtgtcgcatggaaacgtctcctcggcctgtcctccaaaaggagagcctcactcaacatacgttgctcgatgggaccatgcctatttagcgagcgctacgtccttttgtcgtttctatacaccgagtcatgcttacgttccgtgtatttctgtctcactgcatactttgaatcagttcaaaagagtattcgcgctctaaatacccccccgaaaatggcgattcggacggtcctgatctcgctagcaaaaaaagtagtcgtttgctctcgagtgcaactgcctgatgtatcggtgttttagtgtgtgtctgcagcctttcccttatctcggctgtggagcctgtttgtgaaaaagagttgattcagctccatcgcgaggaaaaatcacagcggacacctgacggacgctttcgatccacttttcgtgtggcctcgtcccgggagtttcgcgcatcccccgcgtccttgcccacttgaaatccgttttttataccggcaaaacccggatacgccggagaaacagctgtgcaggggagctctaaatctcctcccacgggaaggaggccgcgaacacgccggctgctgaggaagatgtaccggtggaagttgccgagaggacgttttccgcaggaaaatgagcatcactttcttgcaaccgccgtcccggtcgtcagctaggttgtgtgtgtcaaccccagccaagcgcgacggggttagctggagcgtcgctgtctgtgcagttttttcagttcgtcatcgaccgccggaactagtagtcgtcggccatttcggtccctggtccacggtcacggggtttctccgaaaagtgtgtgctaggaccgacacccggcgtcgcgcgcgacggacagcgagtcatttccaagggttatagctcatcgatgaagcttataacttcgtatagtataccttatacgaagttatgatatgcatgtccgcgttcgtgaaatctctgatcaagcggagtgatcaggaatcatcgtctcagcgggatgacgttgcggagcaggccggctcgcggtgggcagtcagatgccgaaggcgtaactcaggacggcttgcgctcatcgcagaacaggggtggtgcctgcattgggtgcggttggtgatcctggttggaccggtggagatgcgcgcgcacgaaggggatgtgtcagaaacattttgtttgttctctgtgaacttttagatgtgttaaaggcggcgaatattagcagagagtcctccttgttggattctctcttgaatttcgccctttccttctctttgcgagtctcgtagagaacaagcactcgttcgccgtccctgacgacgcaacccgcgcagaagacatccaccaaacggtgttacacaatcaccttgtgtgaagttcttgcggaaaactactcgttggcattttttcttgaattccctttttcgacaaaatgcatgagaaaaaaatcactggatataccaccgttgatatatcccaatcgcatcgtaaagaacattttgaggcatttcagtcagttgctcaatgtacctataaccagaccgttcagctggatattacggcctttttaaagaccgtaaagaaaaataagcacaagttttatccggcctttattcacattcttgcccgcctgatgaatgctcatccggaattccgtatggcaatgaaagacggtgagctggtgatatgggatagtgttcacccttgttacaccgttttccatgagcaaactgaaacgttttcatcgctctggagtgaataccacgacgatttccggcagtttctacacatatattcgcaagatgtggcgtgttacggtgaaaacctggcctatttccctaaagggtttattgagaatatgtttttcgtctcagccaatccctgggtgagtttcaccagttttgatttaaacgtggccaatatggacaacttcttcgcccccgttttcaccatgggcaaatattatacgcaaggcgacaaggtgctgatgccgctggcgattcaggttcatcatgccgtctgtgatggcttccatgtcggcagaatgcttaatgaattacaacagtactgcgatgagtggcagggcggggctcctaggatggtgagcaagggcgaggagctgttcaccggggtggtgcccatcctggtcgagctggacggcgacgtaaacggccacaagttcagcgtgtccggcgagggcgagggcgatgccacctacggcaagctgaccctgaagttcatctgcaccaccggcaagctgcccgtgccctggcccaccctcgtgaccaccctgacctacggcgtgcagtgcttcagccgctaccccgaccacatgaagcagcacgacttcttcaagtccgccatgcccgaaggctacgtccaggagcgcaccatcttcttcaaggacgacggcaactacaagacccgcgccgaggtgaagttcgagggcgacaccctggtgaaccgcatcgagctgaagggcatcgacttcaaggaggacggcaacatcctggggcacaagctggagtacaactacaacagccacaacgtctatatcatggccgacaagcagaagaacggcatcaaggtgaacttcaagatccgccacaacatcgaggacggcagcgtgcagctcgccgaccactaccagcagaacacccccatcggcgacggccccgtgctgctgcccgacaaccactacctgagcacccagtccgccctgagcaaagaccccaacgagaagcgcgatcacatggtcctgctggagttcgtgaccgccgccgggatcactctcggcatggacgagctgtacaagtactcagatctcgagctcgctaggaatgcattagaggtccacacgaaccaggacccgctcgattaattaatcaccgttgtgctcacttctcaaatcgacaaaggaaacacacttcgtgcagcatgtgccccattataaagaaactgagttgttccgttgtggcttgcaggtgtcacatccacagaaaccggccgactctaaataggagtgtttcgcagcaagcagcgaaagtttatgactgggtccgaatctctgaacggatgtgtggcggacctggctgatgttgatcgccgtcgacacacgcgccacatgggtcaatacacaagacagctatcagttgttctagtcgaaccggttaacacaattcttgcccccccgagggataacttcgtatagtataccttatacgaagttatggatctagacatgctgatgaagaagggaagttcctgtaattgccggcgacagacttgtgtccgtgttagatacgcagaacctctgcttggggatgggagtcgaaggctgagcctacgtttcctatcggactgtgacctgccacgccgtcttccctgtgatgtattttcttcgtcccgacggctacgaaaatgttctgcggccacgaggccccgcagttctatcctgtgtgtgttttatttgcttgtctgaggaaaaaccctgctggacgcccatcctaacaagttgacgtgcagcttgagtggatcattttgggtgtacattcgagcacgatgttcactgctccagcttacgccggcgagcgaagaacgcaccgtattccagtcacccactagtagagaaacagccaacccggacactttccgcgcatgactcgcgtagggccgcaggccttctcgtccatcaacggcattatctttcgagaaatgaggacacaggcgtgaacagtgcttgactcgagcagtgccgctcaactgccagctcgactagtttgctatgacacgagtacgctttctttaacattttgttgcggggggctgtcttatttttttcacattcctccccccctctcaagctcatgcctaggatgctgacacaaacacaacctttttgcaagagaagatattctctaaaacagccgtatgaaagctatgagggaatctggttggcactacacttcattgccgttttgtttgtcggttccctggatgctcgtgtcgctgtatcctcaactgttaagagccacgaaatcaacaggacttatggagactgttctcgactttctacgagcgttgcttgaccgacggatatcgcctcacgaaaacatttgcaactcctccgagttatcccctgcttatccttccgcttctctcgatctccagtgtgtgctgtccattccctcacacctttctggcttcgcgtgccgttcccctgccctcttttcatcggagctactttattcgtctctctcttgctgtccgttgtccgcattcgtccagtggtctgcgggactaactactcagccgactcgatgcgcttgcgcttcgcggcgcagtctaagacatgtttggaaagtaggtgtgtttaccaggcacctagatcaaatcccaactgcccatattctgaggcagtctacgtatatacagacataggaatgcatgcagccttcggctggccaacctcgtgcacgcgtgctggctaactcagctctgcgccatggaagcaggccctcacctttccttttgcgtcgaaagcttgctgtctttcgtcgttgtccctccattccctggaagcaaaattccttcccgggtgagctgggtcctcgtattgagctatgaccagggacacagggtctccgccgccgaagaaaccatctccaggcggcgcgtgtggtccggtgtctcgccgctagctctggaggtttcattccttttggcgtttgccacggaagacagtgtgtccacaccggcggcggcaaactgtcacgacacatgttcttttgagatgcagtctcagggccggaacatctgactcctcgcgacagccccggcgcacaggagcttctccggagtccttgaatcgcgctgtccagattcgcttccacgccctcgccccgagaaaacactcagctctcgcaatcgaacggcacgaaaaaaagccaagattgcttctttgtgcggaattcgaacaccgtcgctggttttcgcctgcgcgacttctgcgctgacccacatggtgtgcatctagtcgatttccgtggcgctccgcatgcggtgcggcgggccctctcagtctacgcgcgaaacagacaaggccgagaacaaccgtcctcggatgctctgtacacaccgtcctagatgcgcaaaaatgggaaaacgaactgtttcgcgctttttgcgtgcttctacgggagccttccgtcgagtcaaatgcgacttcccgcaagaacggaaccgtagtctctcctttccttaagcctcccgcgctgtttatgtgttcaatcggcgacgcggctactttttcctcggcagccccgccggaatccaaagacacatgctggtctctttacgcgtcgcttttgttcagcatttcgtggccgtttccatctgtgtgtatatttctctaaggcgcaaggataaacgtgctcggcaatcctgctcgccgtcgcggaaagtccgcctttcctgcgcctggcgcccgcaccgtgaggacagccggcgacagcctccaagagttgcaacgaacgcgcctctcctctctttttttccctacttggcttttttgtgctcctccaccttatttcgcgacgctacgccggccatttctcgtcttccctcgcttcttcgctgcctcttcccccgttctcctgacacatcccccgctagacgcgcaacgtcagtgtgcaggctctcgcctgtcggatatcgcagttccggtctcgaagacttcaggagagagcggccgccaccgcggtggagctccagcttttgttccctttagtgagggttaattgcgcgcttggcgtaatcatggtcatagctgtttcctgtgtgaaattgttatccgctcacaattccacacaacatacgagccggaagcataaagtgtaaagcctggggtgcctaatgagtgagctaactcacattaattgcgttgcgctcactgcccgctttccagtcgggaaacctgtcgtgccagctgcattaatgaatcggccaacgcgcggggagaggcggtttgcgtattgggcgctcttccgcttcctcgctcactgactcgctgcgctcggtcgttcggctgcggcgagcggtatcagctcactcaaaggcggtaatacggttatccacagaatcaggggataacgcaggaaagaacatgtgagcaaaaggccagcaaaaggccaggaaccgtaaaaaggccgcgttgctggcgtttttccataggctccgcccccctgacgagcatcacaaaaatcgacgctcaagtcagaggtggcgaaacccgacaggactataaagataccaggcgtttccccctggaagctccctcgtgcgctctcctgttccgaccctgccgcttaccggatacctgtccgcctttctcccttcgggaagcgtggcgctttctcatagctcacgctgtaggtatctcagttcggtgtaggtcgttcgctccaagctgggctgtgtgcacgaaccccccgttcagcccgaccgctgcgccttatccggtaactatcgtcttgagtccaacccggtaagacacgacttatcgccactggcagcagccactggtaacaggattagcagagcgaggtatgtaggcggtgctacagagttcttgaagtggtggcctaactacggctacactagaaggacagtatttggtatctgcgctctgctgaagccagttaccttcggaaaaagagttggtagctcttgatccggcaaacaaaccaccgctggtagcggtggtttttttgtttgcaagcagcagattacgcgcagaaaaaaaggatctcaagaagatcctttgatcttttctacggggtctgacgctcagtggaacgaaaactcacgttaagggattttggtcatgagattatcaaaaaggatcttcacctagatccttttaaattaaaaatgaagttttaaatcaatctaaagtatatatgagtaaacttggtctgacagttaccaatgcttaatcagtgaggcacctatctcagcgatctgtctatttcgttcatccatagttgcctgactccccgtcgtgtagataactacgatacgggagggcttaccatctggccccagtgctgcaatgataccgcgagacccacgctcaccggctccagatttatcagcaataaaccagccagccggaagggccgagcgcagaagtggtcctgcaactttatccgcctccatccagtctattaattgttgccgggaagctagagtaagtagttcgccagttaatagtttgcgcaacgttgttgccattgctacaggcatcgtggtgtcacgctcgtcgtttggtatggcttcattcagctccggttcccaacgatcaaggcgagttacatgatcccccatgttgtgcaaaaaagcggttagctccttcggtcctccgatcgttgtcagaagtaagttggccgcagtgttatcactcatggttatggcagcactgcataattctcttactgtcatgccatccgtaagatgcttttctgtgactggtgagtactcaaccaagtcattctgagaatagtgtatgcggcgaccgagttgctcttgcccggcgtcaatacgggataataccgcgccacatagcagaactttaaaagtgctcatcattggaaaacgttcttcggggcgaaaactctcaaggatcttaccgctgttgagatccagttcgatgtaacccactcgtgcacccaactgatcttcagcatcttttactttcaccagcgtttctgggtgagcaaaaacaggaaggcaaaatgccgcaaaaaagggaataagggcgacacggaaatgttgaatactcatactcttcctttttcaatattattgaagcatttatcagggttattgtctcatgagcggatacatatttgaatgtatttagaaaaataaacaaataggggttccgcgcacatttccccgaaaagtgccacctgacgcgccctgtagcggcgcattaagcgcggcgggtgtggtggttacgcgcagcgtgaccgctacacttgccagcgccctagcgcccgctcctttcgctttcttcccttcctttctcgccacgttcgccggctttccccgtcaagctctaaatcgggggctccctttagggttccgatttagtgctttacggcacctcgaccccaaaaaacttgattagggtgatggttcacgtagtgggccatcgccctgatagacggtttttcgccctttgacgttggagtccacgttctttaatagtggactcttgttccaaactggaacaacactcaaccctatctcggtctattcttttgatttataagggattttgccgatttcggcctattggttaaaaaatgagctgatttaacaaaaatttaacgcgaattttaacaaaatattaacgcttacaatttccattcgccattcaggctgcgcaactgttgggaagggcgatcggtgcgggcctcttcgctattacgccagctggcgaaagggggatgtgctgcaaggcgattaagttgggtaacgccagggttttcccagtcacgacgttgtaaaacgacggccagtgagcgcgcgtaatacgactcactatagggcgaattgggtac

SEQ ID NO: 2 - DNA, 1449 bp, artificial sequence
  fusion gene
atgcatgagaaaaaaatcactggatataccaccgttgatatatcccaatcgcatcgtaaagaacattttgaggcatttcagtcagttgctcaatgtacctataaccagaccgttcagctggatattacggcctttttaaagaccgtaaagaaaaataagcacaagttttatccggcctttattcacattcttgcccgcctgatgaatgctcatccggaattccgtatggcaatgaaagacggtgagctggtgatatgggatagtgttcacccttgttacaccgttttccatgagcaaactgaaacgttttcatcgctctggagtgaataccacgacgatttccggcagtttctacacatatattcgcaagatgtggcgtgttacggtgaaaacctggcctatttccctaaagggtttattgagaatatgtttttcgtctcagccaatccctgggtgagtttcaccagttttgatttaaacgtggccaatatggacaacttcttcgcccccgttttcaccatgggcaaatattatacgcaaggcgacaaggtgctgatgccgctggcgattcaggttcatcatgccgtctgtgatggcttccatgtcggcagaatgcttaatgaattacaacagtactgcgatgagtggcagggcggggctcctaggatggtgagcaagggcgaggagctgttcaccggggtggtgcccatcctggtcgagctggacggcgacgtaaacggccacaagttcagcgtgtccggcgagggcgagggcgatgccacctacggcaagctgaccctgaagttcatctgcaccaccggcaagctgcccgtgccctggcccaccctcgtgaccaccctgacctacggcgtgcagtgcttcagccgctaccccgaccacatgaagcagcacgacttcttcaagtccgccatgcccgaaggctacgtccaggagcgcaccatcttcttcaaggacgacggcaactacaagacccgcgccgaggtgaagttcgagggcgacaccctggtgaaccgcatcgagctgaagggcatcgacttcaaggaggacggcaacatcctggggcacaagctggagtacaactacaacagccacaacgtctatatcatggccgacaagcagaagaacggcatcaaggtgaacttcaagatccgccacaacatcgaggacggcagcgtgcagctcgccgaccactaccagcagaacacccccatcggcgacggccccgtgctgctgcccgacaaccactacctgagcacccagtccgccctgagcaaagaccccaacgagaagcgcgatcacatggtcctgctggagttcgtgaccgccgccgggatcactctcggcatggacgagctgtacaagtactcagatctcgagctcgctaggaatgcattagaggtccacacgaaccaggacccgctcgattaa

SEQ ID NO: 3 - DNA, 387 bp, Toxoplasma gondii
gaaggcgtaactcaggacggcttgcgctcatcgcagaacaggggtggtgcctgcattgggtgcggttggtgatcctggttggaccggtggagatgcgcgcgcacgaaggggatgtgtcagaaacattttgtttgttctctgtgaacttttagatgtgttaaaggcggcgaatattagcagagagtcctccttgttggattctctcttgaatttcgccctttccttctctttgcgagtctcgtagagaacaagcactcgttcgccgtccctgacgacgcaacccgcgcagaagacatccaccaaacggtgttacacaatcaccttgtgtgaagttcttgcggaaaactactcgttggcattttttcttgaattccctttttcgacaaa

SEQ ID NO: 4 - DNA, 310 bp, Toxoplasma gondii
atcaccgttgtgctcacttctcaaatcgacaaaggaaacacacttcgtgcagcatgtgccccattataaagaaactgagttgttccgttgtggcttgcaggtgtcacatccacagaaaccggccgactctaaataggagtgtttcgcagcaagcagcgaaagtttatgactgggtccgaatctctgaacggatgtgtggcggacctggctgatgttgatcgccgtcgacacacgcgccacatgggtcaatacacaagacagctatcagttgttctagtcgaaccggttaacacaattcttgcccccccga

SEQ ID NO: 5 - DNA, 34 bp, artificial sequence
  recombination site
ataacttcgtatagtataccttatacgaagttat

SEQ ID NO: 6 - DNA, 2149 bp, artificial sequence
  selectable marker
gaaggcgtaactcaggacggcttgcgctcatcgcagaacaggggtggtgcctgcattgggtgcggttggtgatcctggttggaccggtggagatgcgcgcgcacgaaggggatgtgtcagaaacattttgtttgttctctgtgaacttttagatgtgttaaaggcggcgaatattagcagagagtcctccttgttggattctctcttgaatttcgccctttccttctctttgcgagtctcgtagagaacaagcactcgttcgccgtccctgacgacgcaacccgcgcagaagacatccaccaaacggtgttacacaatcaccttgtgtgaagttcttgcggaaaactactcgttggcattttttcttgaattccctttttcgacaaaatgcatgagaaaaaaatcactggatataccaccgttgatatatcccaatcgcatcgtaaagaacattttgaggcatttcagtcagttgctcaatgtacctataaccagaccgttcagctggatattacggcctttttaaagaccgtaaagaaaaataagcacaagttttatccggcctttattcacattcttgcccgcctgatgaatgctcatccggaattccgtatggcaatgaaagacggtgagctggtgatatgggatagtgttcacccttgttacaccgttttccatgagcaaactgaaacgttttcatcgctctggagtgaataccacgacgatttccggcagtttctacacatatattcgcaagatgtggcgtgttacggtgaaaacctggcctatttccctaaagggtttattgagaatatgtttttcgtctcagccaatccctgggtgagtttcaccagttttgatttaaacgtggccaatatggacaacttcttcgcccccgttttcaccatgggcaaatattatacgcaaggcgacaaggtgctgatgccgctggcgattcaggttcatcatgccgtctgtgatggcttccatgtcggcagaatgcttaatgaattacaacagtactgcgatgagtggcagggcggggctcctaggatggtgagcaagggcgaggagctgttcaccggggtggtgcccatcctggtcgagctggacggcgacgtaaacggccacaagttcagcgtgtccggcgagggcgagggcgatgccacctacggcaagctgaccctgaagttcatctgcaccaccggcaagctgcccgtgccctggcccaccctcgtgaccaccctgacctacggcgtgcagtgcttcagccgctaccccgaccacatgaagcagcacgacttcttcaagtccgccatgcccgaaggctacgtccaggagcgcaccatcttcttcaaggacgacggcaactacaagacccgcgccgaggtgaagttcgagggcgacaccctggtgaaccgcatcgagctgaagggcatcgacttcaaggaggacggcaacatcctggggcacaagctggagtacaactacaacagccacaacgtctatatcatggccgacaagcagaagaacggcatcaaggtgaacttcaagatccgccacaacatcgaggacggcagcgtgcagctcgccgaccactaccagcagaacacccccatcggcgacggccccgtgctgctgcccgacaaccactacctgagcacccagtccgccctgagcaaagaccccaacgagaagcgcgatcacatggtcctgctggagttcgtgaccgccgccgggatcactctcggcatggacgagctgtacaagtactcagatctcgagctcgctaggaatgcattagaggtccacacgaaccaggacccgctcgattaattaatcaccgttgtgctcacttctcaaatcgacaaaggaaacacacttcgtgcagcatgtgccccattataaagaaactgagttgttccgttgtggcttgcaggtgtcacatccacagaaaccggccgactctaaataggagtgtttcgcagcaagcagcgaaagtttatgactgggtccgaatctctgaacggatgtgtggcggacctggctgatgttgatcgccgtcgacacacgcgccacatgggtcaatacacaagacagctatcagttgttctagtcgaaccggttaacacaattcttgcccccccga

SEQ ID NO: 7 - DNA, 90 bp, artificial sequence
  primer
tccgctctcagagaatcgatgaagcttataacttcgtatagtataccttatacgaagttatgatatgcatgtccgcgttcgtgaaatctc

SEQ ID NO: 8 - DNA, 90 bp, artificial sequence
  primer
atacgtaaacttctagatccataacttcgtataaggtatactatacgaagttatccctcgggggggcaagaattgtgttaaccggttcga

SEQ ID NO: 9 - DNA, 5202 bp, artificial sequence
  plasmid
agcttgatatgcatgtccgcgttcgtgaaatctctgatcaagcggagtgatcaggaatcatcgtctcagcgggatgacgttgcggagcaggccggctcgcggtgggcagtcagatgccgaaggcgtaactcaggacggcttgcgctcatcgcagaacaggggtggtgcctgcattgggtgcggttggtgatcctggttggaccggtggagatgcgcgcgcacgaaggggatgtgtcagaaacattttgtttgttctctgtgaacttttagatgtgttaaaggcggcgaatattagcagagagtcctccttgttggattctctcttgaatttcgccctttccttctctttgcgagtctcgtagagaacaagcactcgttcgccgtccctgacgacgcaacccgcgcagaagacatccaccaaacggtgttacacaatcaccttgtgtgaagttcttgcggaaaactactcgttggcattttttcttgaattccctttttcgacaaaatgcatgagaaaaaaatcactggatataccaccgttgatatatcccaatcgcatcgtaaagaacattttgaggcatttcagtcagttgctcaatgtacctataaccagaccgttcagctggatattacggcctttttaaagaccgtaaagaaaaataagcacaagttttatccggcctttattcacattcttgcccgcctgatgaatgctcatccggaattccgtatggcaatgaaagacggtgagctggtgatatgggatagtgttcacccttgttacaccgttttccatgagcaaactgaaacgttttcatcgctctggagtgaataccacgacgatttccggcagtttctacacatatattcgcaagatgtggcgtgttacggtgaaaacctggcctatttccctaaagggtttattgagaatatgtttttcgtctcagccaatccctgggtgagtttcaccagttttgatttaaacgtggccaatatggacaacttcttcgcccccgttttcaccatgggcaaatattatacgcaaggcgacaaggtgctgatgccgctggcgattcaggttcatcatgccgtctgtgatggcttccatgtcggcagaatgcttaatgaattacaacagtactgcgatgagtggcagggcggggctcctaggatggtgagcaagggcgaggagctgttcaccggggtggtgcccatcctggtcgagctggacggcgacgtaaacggccacaagttcagcgtgtccggcgagggcgagggcgatgccacctacggcaagctgaccctgaagttcatctgcaccaccggcaagctgcccgtgccctggcccaccctcgtgaccaccctgacctacggcgtgcagtgcttcagccgctaccccgaccacatgaagcagcacgacttcttcaagtccgccatgcccgaaggctacgtccaggagcgcaccatcttcttcaaggacgacggcaactacaagacccgcgccgaggtgaagttcgagggcgacaccctggtgaaccgcatcgagctgaagggcatcgacttcaaggaggacggcaacatcctggggcacaagctggagtacaactacaacagccacaacgtctatatcatggccgacaagcagaagaacggcatcaaggtgaacttcaagatccgccacaacatcgaggacggcagcgtgcagctcgccgaccactaccagcagaacacccccatcggcgacggccccgtgctgctgcccgacaaccactacctgagcacccagtccgccctgagcaaagaccccaacgagaagcgcgatcacatggtcctgctggagttcgtgaccgccgccgggatcactctcggcatggacgagctgtacaagtactcagatctcgagctcgctaggaatgcattagaggtccacacgaaccaggacccgctcgattaattaatcaccgttgtgctcacttctcaaatcgacaaaggaaacacacttcgtgcagcatgtgccccattataaagaaactgagttgttccgttgtggcttgcaggtgtcacatccacagaaaccggccgactctaaataggagtgtttcgcagcaagcagcgaaagtttatgactgggtccgaatctctgaacggatgtgtggcggacctggctgatgttgatcgccgtcgacacacgcgccacatgggtcaatacacaagacagctatcagttgttctagtcgaaccggttaacacaattcttgcccccccgagggggatccactagttctagagcggccgccaccgcggtggagctccagcttttgttccctttagtgagggttaattgcgcgcttggcgtaatcatggtcatagctgtttcctgtgtgaaattgttatccgctcacaattccacacaacatacgagccggaagcataaagtgtaaagcctggggtgcctaatgagtgagctaactcacattaattgcgttgcgctcactgcccgctttccagtcgggaaacctgtcgtgccagctgcattaatgaatcggccaacgcgcggggagaggcggtttgcgtattgggcgctcttccgcttcctcgctcactgactcgctgcgctcggtcgttcggctgcggcgagcggtatcagctcactcaaaggcggtaatacggttatccacagaatcaggggataacgcaggaaagaacatgtgagcaaaaggccagcaaaaggccaggaaccgtaaaaaggccgcgttgctggcgtttttccataggctccgcccccctgacgagcatcacaaaaatcgacgctcaagtcagaggtggcgaaacccgacaggactataaagataccaggcgtttccccctggaagctccctcgtgcgctctcctgttccgaccctgccgcttaccggatacctgtccgcctttctcccttcgggaagcgtggcgctttctcatagctcacgctgtaggtatctcagttcggtgtaggtcgttcgctccaagctgggctgtgtgcacgaaccccccgttcagcccgaccgctgcgccttatccggtaactatcgtcttgagtccaacccggtaagacacgacttatcgccactggcagcagccactggtaacaggattagcagagcgaggtatgtaggcggtgctacagagttcttgaagtggtggcctaactacggctacactagaaggacagtatttggtatctgcgctctgctgaagccagttaccttcggaaaaagagttggtagctcttgatccggcaaacaaaccaccgctggtagcggtggtttttttgtttgcaagcagcagattacgcgcagaaaaaaaggatctcaagaagatcctttgatcttttctacggggtctgacgctcagtggaacgaaaactcacgttaagggattttggtcatgagattatcaaaaaggatcttcacctagatccttttaaattaaaaatgaagttttaaatcaatctaaagtatatatgagtaaacttggtctgacagttaccaatgcttaatcagtgaggcacctatctcagcgatctgtctatttcgttcatccatagttgcctgactccccgtcgtgtagataactacgatacgggagggcttaccatctggccccagtgctgcaatgataccgcgagacccacgctcaccggctccagatttatcagcaataaaccagccagccggaagggccgagcgcagaagtggtcctgcaactttatccgcctccatccagtctattaattgttgccgggaagctagagtaagtagttcgccagttaatagtttgcgcaacgttgttgccattgctacaggcatcgtggtgtcacgctcgtcgtttggtatggcttcattcagctccggttcccaacgatcaaggcgagttacatgatcccccatgttgtgcaaaaaagcggttagctccttcggtcctccgatcgttgtcagaagtaagttggccgcagtgttatcactcatggttatggcagcactgcataattctcttactgtcatgccatccgtaagatgcttttctgtgactggtgagtactcaaccaagtcattctgagaatagtgtatgcggcgaccgagttgctcttgcccggcgtcaatacgggataataccgcgccacatagcagaactttaaaagtgctcatcattggaaaacgttcttcggggcgaaaactctcaaggatcttaccgctgttgagatccagttcgatgtaacccactcgtgcacccaactgatcttcagcatcttttactttcaccagcgtttctgggtgagcaaaaacaggaaggcaaaatgccgcaaaaaagggaataagggcgacacggaaatgttgaatactcatactcttcctttttcaatattattgaagcatttatcagggttattgtctcatgagcggatacatatttgaatgtatttagaaaaataaacaaataggggttccgcgcacatttccccgaaaagtgccacctgacgcgccctgtagcggcgcattaagcgcggcgggtgtggtggttacgcgcagcgtgaccgctacacttgccagcgccctagcgcccgctcctttcgctttcttcccttcctttctcgccacgttcgccggctttccccgtcaagctctaaatcgggggctccctttagggttccgatttagtgctttacggcacctcgaccccaaaaaacttgattagggtgatggttcacgtagtgggccatcgccctgatagacggtttttcgccctttgacgttggagtccacgttctttaatagtggactcttgttccaaactggaacaacactcaaccctatctcggtctattcttttgatttataagggattttgccgatttcggcctattggttaaaaaatgagctgatttaacaaaaatttaacgcgaattttaacaaaatattaacgcttacaatttccattcgccattcaggctgcgcaactgttgggaagggcgatcggtgcgggcctcttcgctattacgccagctggcgaaagggggatgtgctgcaaggcgattaagttgggtaacgccagggttttcccagtcacgacgttgtaaaacgacggccagtgagcgcgcgtaatacgactcactatagggcgaattgggtaccgggccccccctcgaggtcgacggtatcgata

SEQ ID NO: 10 - DNA, 11312 bp, artificial sequence
  plasmid
ctagacatgctgatgaagaagggaagttcctgtaattgccggcgacagacttgtgtccgtgttagatacgcagaacctctgcttggggatgggagtcgaaggctgagcctacgtttcctatcggactgtgacctgccacgccgtcttccctgtgatgtattttcttcgtcccgacggctacgaaaatgttctgcggccacgaggccccgcagttctatcctgtgtgtgttttatttgcttgtctgaggaaaaaccctgctggacgcccatcctaacaagttgacgtgcagcttgagtggatcattttgggtgtacattcgagcacgatgttcactgctccagcttacgccggcgagcgaagaacgcaccgtattccagtcacccactagtagagaaacagccaacccggacactttccgcgcatgactcgcgtagggccgcaggccttctcgtccatcaacggcattatctttcgagaaatgaggacacaggcgtgaacagtgcttgactcgagcagtgccgctcaactgccagctcgactagtttgctatgacacgagtacgctttctttaacattttgttgcggggggctgtcttatttttttcacattcctccccccctctcaagctcatgcctaggatgctgacacaaacacaacctttttgcaagagaagatattctctaaaacagccgtatgaaagctatgagggaatctggttggcactacacttcattgccgttttgtttgtcggttccctggatgctcgtgtcgctgtatcctcaactgttaagagccacgaaatcaacaggacttatggagactgttctcgactttctacgagcgttgcttgaccgacggatatcgcctcacgaaaacatttgcaactcctccgagttatcccctgcttatccttccgcttctctcgatctccagtgtgtgctgtccattccctcacacctttctggcttcgcgtgccgttcccctgccctcttttcatcggagctactttattcgtctctctcttgctgtccgttgtccgcattcgtccagtggtctgcgggactaactactcagccgactcgatgcgcttgcgcttcgcggcgcagtctaagacatgtttggaaagtaggtgtgtttaccaggcacctagatcaaatcccaactgcccatattctgaggcagtctacgtatatacagacataggaatgcatgcagccttcggctggccaacctcgtgcacgcgtgctggctaactcagctctgcgccatggaagcaggccctcacctttccttttgcgtcgaaagcttgctgtctttcgtcgttgtccctccattccctggaagcaaaattccttcccgggtgagctgggtcctcgtattgagctatgaccagggacacagggtctccgccgccgaagaaaccatctccaggcggcgcgtgtggtccggtgtctcgccgctagctctggaggtttcattccttttggcgtttgccacggaagacagtgtgtccacaccggcggcggcaaactgtcacgacacatgttcttttgagatgcagtctcagggccggaacatctgactcctcgcgacagccccggcgcacaggagcttctccggagtccttgaatcgcgctgtccagattcgcttccacgccctcgccccgagaaaacactcagctctcgcaatcgaacggcacgaaaaaaagccaagattgcttctttgtgcggaattcgaacaccgtcgctggttttcgcctgcgcgacttctgcgctgacccacatggtgtgcatctagtcgatttccgtggcgctccgcatgcggtgcggcgggccctctcagtctacgcgcgaaacagacaaggccgagaacaaccgtcctcggatgctctgtacacaccgtcctagatgcgcaaaaatgggaaaacgaactgtttcgcgctttttgcgtgcttctacgggagccttccgtcgagtcaaatgcgacttcccgcaagaacggaaccgtagtctctcctttccttaagcctcccgcgctgtttatgtgttcaatcggcgacgcggctactttttcctcggcagccccgccggaatccaaagacacatgctggtctctttacgcgtcgcttttgttcagcatttcgtggccgtttccatctgtgtgtatatttctctaaggcgcaaggataaacgtgctcggcaatcctgctcgccgtcgcggaaagtccgcctttcctgcgcctggcgcccgcaccgtgaggacagccggcgacagcctccaagagttgcaacgaacgcgcctctcctctctttttttccctacttggcttttttgtgctcctccaccttatttcgcgacgctacgccggccatttctcgtcttccctcgcttcttcgctgcctcttcccccgttctcctgacacatcccccgctagacgcgcaacgtcagtgtgcaggctctcgcctgtcggatatcgcagttccggtctcgaagacttcaggagagagcggccgccaccgcggtggagctccagcttttgttccctttagtgagggttaattgcgcgcttggcgtaatcatggtcatagctgtttcctgtgtgaaattgttatccgctcacaattccacacaacatacgagccggaagcataaagtgtaaagcctggggtgcctaatgagtgagctaactcacattaattgcgttgcgctcactgcccgctttccagtcgggaaacctgtcgtgccagctgcattaatgaatcggccaacgcgcggggagaggcggtttgcgtattgggcgctcttccgcttcctcgctcactgactcgctgcgctcggtcgttcggctgcggcgagcggtatcagctcactcaaaggcggtaatacggttatccacagaatcaggggataacgcaggaaagaacatgtgagcaaaaggccagcaaaaggccaggaaccgtaaaaaggccgcgttgctggcgtttttccataggctccgcccccctgacgagcatcacaaaaatcgacgctcaagtcagaggtggcgaaacccgacaggactataaagataccaggcgtttccccctggaagctccctcgtgcgctctcctgttccgaccctgccgcttaccggatacctgtccgcctttctcccttcgggaagcgtggcgctttctcatagctcacgctgtaggtatctcagttcggtgtaggtcgttcgctccaagctgggctgtgtgcacgaaccccccgttcagcccgaccgctgcgccttatccggtaactatcgtcttgagtccaacccggtaagacacgacttatcgccactggcagcagccactggtaacaggattagcagagcgaggtatgtaggcggtgctacagagttcttgaagtggtggcctaactacggctacactagaaggacagtatttggtatctgcgctctgctgaagccagttaccttcggaaaaagagttggtagctcttgatccggcaaacaaaccaccgctggtagcggtggtttttttgtttgcaagcagcagattacgcgcagaaaaaaaggatctcaagaagatcctttgatcttttctacggggtctgacgctcagtggaacgaaaactcacgttaagggattttggtcatgagattatcaaaaaggatcttcacctagatccttttaaattaaaaatgaagttttaaatcaatctaaagtatatatgagtaaacttggtctgacagttaccaatgcttaatcagtgaggcacctatctcagcgatctgtctatttcgttcatccatagttgcctgactccccgtcgtgtagataactacgatacgggagggcttaccatctggccccagtgctgcaatgataccgcgagacccacgctcaccggctccagatttatcagcaataaaccagccagccggaagggccgagcgcagaagtggtcctgcaactttatccgcctccatccagtctattaattgttgccgggaagctagagtaagtagttcgccagttaatagtttgcgcaacgttgttgccattgctacaggcatcgtggtgtcacgctcgtcgtttggtatggcttcattcagctccggttcccaacgatcaaggcgagttacatgatcccccatgttgtgcaaaaaagcggttagctccttcggtcctccgatcgttgtcagaagtaagttggccgcagtgttatcactcatggttatggcagcactgcataattctcttactgtcatgccatccgtaagatgcttttctgtgactggtgagtactcaaccaagtcattctgagaatagtgtatgcggcgaccgagttgctcttgcccggcgtcaatacgggataataccgcgccacatagcagaactttaaaagtgctcatcattggaaaacgttcttcggggcgaaaactctcaaggatcttaccgctgttgagatccagttcgatgtaacccactcgtgcacccaactgatcttcagcatcttttactttcaccagcgtttctgggtgagcaaaaacaggaaggcaaaatgccgcaaaaaagggaataagggcgacacggaaatgttgaatactcatactcttcctttttcaatattattgaagcatttatcagggttattgtctcatgagcggatacatatttgaatgtatttagaaaaataaacaaataggggttccgcgcacatttccccgaaaagtgccacctgacgcgccctgtagcggcgcattaagcgcggcgggtgtggtggttacgcgcagcgtgaccgctacacttgccagcgccctagcgcccgctcctttcgctttcttcccttcctttctcgccacgttcgccggctttccccgtcaagctctaaatcgggggctccctttagggttccgatttagtgctttacggcacctcgaccccaaaaaacttgattagggtgatggttcacgtagtgggccatcgccctgatagacggtttttcgccctttgacgttggagtccacgttctttaatagtggactcttgttccaaactggaacaacactcaaccctatctcggtctattcttttgatttataagggattttgccgatttcggcctattggttaaaaaatgagctgatttaacaaaaatttaacgcgaattttaacaaaatattaacgcttacaatttccattcgccattcaggctgcgcaactgttgggaagggcgatcggtgcgggcctcttcgctattacgccagctggcgaaagggggatgtgctgcaaggcgattaagttgggtaacgccagggttttcccagtcacgacgttgtaaaacgacggccagtgagcgcgcgtaatacgactcactatagggcgaattgggtacccatgtgaatatgctttaaccgtgacagcgttcgtgtaagaccgttgatacgtggcacaagaacggcccaacttggtgagatgcgctggcgaacccgttgcattcacgcgggaggcataagtcgcctggagggcgcataggagcgggaggtttgcagcgctgtgtatttcgctgccgcatgggaagttgaatccagtggtgtgaggattggcgtacacatttccgtccacgctcggtctgtaaaaagccttttcatagctagtagtgaatacgtgtccattccgcatttgcggcgcgcgtgtggttcctgcgtctgcgacagtgactttcctgtcgatccgaatacggtcaggatattgaaatccaacagggctgttgtttgattcgcgtgtttctgttcgcaccttgttcttgcatgtgggctctttcgttctttggtcgattttctcaggatccctcgactgcacagtcaagctctggagctgtaatcgtgctcagcagatggaactggcggagaaggagttgaaaggagatggacctgcgtgaagtagcgcctcccccgttcgctttaagcttttccgtcagatccacccgtttcctatgctattttcgatgcgctttcagttcgacttccctggttttcttcgaattcgcaccgtctcccaatgcaccagtcttttcacctcttttctagcatcttctgttttggggggtcgggcggcgcagggcgtcccccagtcacagtagtcggcagaggtacgcgccgcgtccacgcagaggtcttcttcctggtgggtgcatagggatgcatgtgctttttagagttgcatgcgtgtgttttcccatttgtggatatacgtacatgcatatgtgcacgcgctcgcaaatttatgggataggcattcgacaaacacaccgtaggaacgccatctgatgccaccaacggagcagtgtagagctgaatattcctgtccctcgtatgtactgaacgaaactaatctattgtcgccgcaatagcgagaaggtaacttgaggtgcacagactggagggaggcataacggaaacatttcatcagaagccttcacacggcgaaggtgcgaaaattcccgtgcctccttttttcccacatctgcgattccaaattcgtgactcccctacctcgcgcatccgttaaaggcaacgttctcaccagtacacggaagcaaacgtccgcatacacttctctttgagaagggggatcgtaaaaggccccgaaaaatcctacagttccctcgttcttcgcaccgcagccagcacaaaatgcaggaagcagagagccgcgggaagggcaagtgacatatgagatgtgtgtcgcgaactgatggcttcggcccatcttcgccgtcgtattgaacagagttttctggccacgcgaaaagcacggcgaagtgtcgcatggaaacgtctcctcggcctgtcctccaaaaggagagcctcactcaacatacgttgctcgatgggaccatgcctatttagcgagcgctacgtccttttgtcgtttctatacaccgagtcatgcttacgttccgtgtatttctgtctcactgcatactttgaatcagttcaaaagagtattcgcgctctaaatacccccccgaaaatggcgattcggacggtcctgatctcgctagcaaaaaaagtagtcgtttgctctcgagtgcaactgcctgatgtatcggtgttttagtgtgtgtctgcagcctttcccttatctcggctgtggagcctgtttgtgaaaaagagttgattcagctccatcgcgaggaaaaatcacagcggacacctgacggacgctttcgatccacttttcgtgtggcctcgtcccgggagtttcgcgcatcccccgcgtccttgcccacttgaaatccgttttttataccggcaaaacccggatacgccggagaaacagctgtgcaggggagctctaaatctcctcccacgggaaggaggccgcgaacacgccggctgctgaggaagatgtaccggtggaagttgccgagaggacgttttccgcaggaaaatgagcatcactttcttgcaaccgccgtcccggtcgtcagctaggttgtgtgtgtcaaccccagccaagcgcgacggggttagctggagcgtcgctgtctgtgcagttttttcagttcgtcatcgaccgccggaactagtagtcgtcggccatttcggtccctggtccacggtcacggggtttctccgaaaagtgtgtgctaggaccgacacccggcgtcgcgcgcgacggacagcgagtcatttccaagggttatagctcatcgataagcttcgccaggctgtaaatcccgtgagtcgtcctcacaaatcatcaagcaggtgtcctcagggagactgcctgactgagttatgctaattcctttctactttggcgtggtcacgtgtaaccatatccgaatcatttctctagccctacgaacaggtaagagcgctagggatgtccgtggagtagtgtgcttactcgataatattcagttgggactaccagcgaggcgctcgctttgctcacgcaatgcctgagacagttgcagaatgaatggtaaccgacaaacgcgttcatatgcgttttcaaacttagtagacgcgtactgtctgaaactggcggtcacaggcaccagataacgcccttggcatcggcatgtctcgtacagaggtccgtatgtagtgccacgacttctaaatccggcgacaggctggtcttttgtcttaccacgtattagcccgcgtgcgatttctcggagcgcacctgttcaacactagaaaacggagtttcctgatcgagaagccaccacctttccagaagttgaacgctagcatgtcattcgattttcaccccccgcgtagttcctgtgtgtcattcgttgtcgagacaactctgtcccgccccggtgctgttccatatgcgtgactttcccgcaattttttcagactttcaggaaagacaggctccggaacgatctcgtccatgactggtaaatccacgacaccgcaatggcccccagcacctctatctctcgtgccaggggactaacgttgtatgcgtctgcgtcttgtctttttgcattcgctttccaaaaaagagagccatccgttcccccgcacattcaacgccgcgagtgcggtttttgtcttttttgagtggtaggacgcttttcatgcgcgaactacgtggacattaagttccattctctttttcgacagcacgaaaccttgcattcaaacccgcccgcggaagatccgatcttgctgctgttcgcagtcccagtagcgtcctgtcggccgcgccgtctctgttggtgggcagccgctacacctgttatctgactgccgtgcgcgaaaatgacgccatttttgggaaaatcggggaacttcattctttaaaagtatgcggaggtttcctttttcttctgttcgtttctttttctcgggtttgataaccgtgttcgatgtaagcactttccgtctctcctccgtgctttgttcgacatcgagaccaggtgtgcagatccttcgcttgtcgatccggagacgcgtgtctcgtagaaccttttcattttaccacacggcagtgcggagcactgctctgagtgcagcagggacgggtgaagtttcgctttagtagtgcgtttctgctctacggggcgttgtcgtgtctgggaagatgcagaaaccggtgtgtctggtcgtcgcgatgacccccaagaggggcatcggcatcaacaacggcctcccgtggccccacttgaccacagatttcaaacactttcgtcgtgtgacaaaaacgacgcccgaagaagccagtcgcctgaacgggtggcttcccaggaaatttgcaaagacgggcgactctggacttccctctccatcagtcggcaagagattcaacgccgttgtcatgggacggaaaaactgggaaagcatgcctcgaaagtttagacccctcgtggacagattgaacatcgtcgtttcctcttccctcaaagaagaagacattgcggcggagaagcctcaagctgaaggccagcagcgcgtccgagtctgtgcttcactcccagcagctctcagccttctggaggaagagtacaaggattctgtcgaccagatttttgtcgtgggaggagcgggactgtacgaggcagcgctgtctctgggcgttgcctctcacctgtacatcacgcgtgtagcccgcgagtttccgtgcgacgttttcttccctgcgttccccggagatgacattctttcaaacaaatcaactgctgcgcaggctgcagctcctgccgagtctgtgttcgttcccttttgtccggagctcggaagagagaaggacaatgaagcgacgtatcgacccatcttcatttccaagaccttctcagacaacggggtaccctacgactccgtggttctcgagaagagaaggaagactgacgacgcagccactgcggaaccgagcaacgcaatgagctccttgacgtccacgagggagacaactcccgtgcacgggttgcaggctccttcttcggccgcagccattgccccggtgttggcgtggatggacgaagaagaccggaaaaaacgcgagcaaaaggaactgattcgggccgttccgcatgttcactttagaggccatgaagaattccagtaccttgatctcattgccgacattattaacaatggaaggacaatggatgaccgaacgggcgttggtgtcatctccaaattcggctgcactatgcgctactcgctggatcaggcctttccacttctcaccacaaagcgtgtgttctggaaaggggtcctcgaagagttgctgtggttcattcgcggcgacacgaacgcaaaccatctttctgagaagggcgtgaagatctgggacaagaatgtgacacgcgagttcctcgattcgcgcaatctcccccaccgagaggtcggagacatcggcccgggctacggcttccagtggagacacttcggcgcggcatacaaagacatgcacacagactacacagggcagggcgtcgaccagctgaagaatgtgatccagatgctgagaacgaatccaacagatcgtcgcatgctcatgactgcctggaatcctgcagcgctggacgaaatggcgctgccgccttgtcacttgttgtgccagttctacgtgaacgaccagaaggagctgtcgtgcatcatgtatcagcggtcgtgcgatgtcggcctcggcgtccccttcaacatcgcttcctattcgcttttgacgctcatggttgcacacgtctgcaacctaaaacctaaggagttcattcacttcatggggaacacgcatgtctacacgaaccatgtcgaggctttaaaagagcagctgcggagagaaccgagaccgttccccattgtgaacatcctcaacaaggaacgcatcaaggaaatcgacgatttcaccgccgaggattttgaggtcgtgggctacgtcccgcacggacgaatccagatggagatggctgtctagcggaaatacagaagctgcccgtctctcgttttcctctcttttcggagggatcagggagagtgcctcgggtcggagagagctgacgagggggtgccagagacccctgtgtcctttatcgaagaaaagggatgactcttcatgtggcatttcacacagtctcacctcgccttgttttctttttgtcaatcagaacgaaagcgagttgcgggtgacgcagatgtgcgtgtatccactcgtgaatgcgttatcgttctgtatgccgctagagtgctggactgttgctgtctgcccacgacagcagacaactttccttctatgcacttgcaggatgaattcctgcagcccgggggatcgatccactagtt

SEQ ID NO: 11 - DNA, 10069 bp, artificial sequence
  plasmid
caggcagaagtaaagaaggttcctccggttggcggaccaaaggcagaagtaaagaaggttcctccggttggcggaccaaaggcagaagtaaagaaggttcctccggttggcggaccaaaggcagaagtgaagaaggttcctccggttggcggaccaaaggcagaagtgaagaagattcctcctggcgggcctctaggcgcaccgaaagctgacggcagcccccaagcggcacaggacggcgggactctaccgaaggccaagctcgggccaccaccagggttaggaaaagtgctgactagtgaagctgctgagagtataaaagaaacaggcccagcaaagaaaagcgctttgcccggaaaaggagtgccgccactggggaagaaggggccgccactggctgcaaaggtagaagagaaaggtggagattcaccgccagctgccgcgaaggcttcgtcaagttcggtggaccaagctgcggatcagaacgaaggagcgggagtagcaggtacacccgtaaaaaaaggaccgcctctcgggaaaggtccgccacccaaaaaagcgcccttggtggggaagaaggctcctacggctcctgaggcaccagacgccaaggtaaggtcgatcagtgagctggacaccggagcagcacgtctgaccaggctgacacatcaacgtaagttccggaagtttgtaaagaagaggcggctgacaagcatagagttcataccagtacacgagaatgcacagcgccgccttatattcgtcgggggggtcgtcctaggtccgcattgcccgctgtgcaaagccaattattatctaaatcgtttgttggttgtgtcgttgtgcggtgttgttgaccaggctgacgacgcgccaggaacggcggcgaaaaaagggccgcctaaaggcctccctcccaaaggaaaagcgccccctaagggtacgttggctagagacctgttgatgatattatcggaggatgcttgctacaagcatcggtgatatttgctttcattctcgtttagcagcacactgacagctccatggcatgcacggaggttggacagcagctgctgtcggactgggcagaaaacggggtcggttttcggtcatagagcttgcacttgttcttcgccacacgcgttgattgtagggggtacagtaaaccatgcgtagagtgctgaaaagggcgtttcaaaggtcacctagtttgcagctcgttagccggcatacgccaccaggaagttccgatattttcctctttctcttgtttgtgtccaggcaaaggatttctgtgagataccgtcgacccatgttgcaaccggcactactctagacaaataaatctgatctggtggcaagagcaggtgctacccgcaacagacgcgcatttcttctggttgctggtctgccgtgctgtgcatatagagcaaaagcacacccagcaatttgtttgttccggaatgaagctacatgagtgtatgtctgaggatcgttgtgttaacgaattcttacgggaaacaccagtagtgcccgtgttaattctccagtaaaacactacgtttcaaactctacccctcttacgcggtggcgccgttcgcccacctcccctcccgcgggagagacaacgctcggtgtccgcccgtcgctgcgagttctctgattgccttctagcgcaatagccagagcgctagaaagactgaaacaagagaagccgtctacaaacactgtagtgattgccttcgtccagaagcctcactcacattacagacctaggcagctcatcgtggcacctagcgttaagcaccgcttacataacaatgttgcacgaaccgctttgattctgtagcataactgccagcattcaaaatggtacttctaacgaccgattaccgacaaccgctcacacagcgaaaggctgccggtactctcggaatggacgcgcgcactgaagtctattattcacgtcgtgactaccatcgacgatccttgactctttccgcccgtccactgggccgtgtggttgaagcgacgtcactcagcttgaatgtgtagtagccggccgcctgactgtaaaatacacttgtattctacagtgtcaccatgctacgaacgttgtcgtacatcacttgctgcgttcgcatcctcacgtaactcaatggaacgtacgacgaattacgtataaaatcggacagaatgcaccataacacagttttcttcactgagacagaaacatctgaccacttaacatgacttcaggcgacatactgcattggatctaggctagaatctcaggctagaaaatacagacccgagaaatatggacggacgggaaggcaaaaaaaaaactaaaaaaaactaaggatgggaccctcgcgcatgcccgacttgcaggtgttgcgcttcttttcttgcgtgatcaaagcttataacttcgtataatgtatgctatacgaagttatgatatgcatgtccgcgttcgtgaaatctctgatcaagcggagtgatcaggaatcatcgtctcagcgggatgacgttgcggagcaggccggctcgcggtgggcagtcagatgccgaaggcgtaactcaggacggcttgcgctcatcgcagaacaggggtggtgcctgcattgggtgcggttggtgatcctggttggaccggtggagatgcgcgcgcacgaaggggatgtgtcagaaacattttgtttgttctctgtgaacttttagatgtgttaaaggcggcgaatattagcagagagtcctccttgttggattctctcttgaatttcgccctttccttctctttgcgagtctcgtagagaacaagcactcgttcgccgtccctgacgacgcaacccgcgcagaagacatccaccaaacggtgttacacaatcaccttgtgtgaagttcttgcggaaaactactcgttggcattttttcttgaattccctttttcgacaaaatgcatgagaaaaaaatcactggatataccaccgttgatatatcccaatcgcatcgtaaagaacattttgaggcatttcagtcagttgctcaatgtacctataaccagaccgttcagctggatattacggcctttttaaagaccgtaaagaaaaataagcacaagttttatccggcctttattcacattcttgcccgcctgatgaatgctcatccggaattccgtatggcaatgaaagacggtgagctggtgatatgggatagtgttcacccttgttacaccgttttccatgagcaaactgaaacgttttcatcgctctggagtgaataccacgacgatttccggcagtttctacacatatattcgcaagatgtggcgtgttacggtgaaaacctggcctatttccctaaagggtttattgagaatatgtttttcgtctcagccaatccctgggtgagtttcaccagttttgatttaaacgtggccaatatggacaacttcttcgcccccgttttcaccatgggcaaatattatacgcaaggcgacaaggtgctgatgccgctggcgattcaggttcatcatgccgtctgtgatggcttccatgtcggcagaatgcttaatgaattacaacagtactgcgatgagtggcagggcggggctcctaggatggtgagcaagggcgaggagctgttcaccggggtggtgcccatcctggtcgagctggacggcgacgtaaacggccacaagttcagcgtgtccggcgagggcgagggcgatgccacctacggcaagctgaccctgaagttcatctgcaccaccggcaagctgcccgtgccctggcccaccctcgtgaccaccctgacctacggcgtgcagtgcttcagccgctaccccgaccacatgaagcagcacgacttcttcaagtccgccatgcccgaaggctacgtccaggagcgcaccatcttcttcaaggacgacggcaactacaagacccgcgccgaggtgaagttcgagggcgacaccctggtgaaccgcatcgagctgaagggcatcgacttcaaggaggacggcaacatcctggggcacaagctggagtacaactacaacagccacaacgtctatatcatggccgacaagcagaagaacggcatcaaggtgaacttcaagatccgccacaacatcgaggacggcagcgtgcagctcgccgaccactaccagcagaacacccccatcggcgacggccccgtgctgctgcccgacaaccactacctgagcacccagtccgccctgagcaaagaccccaacgagaagcgcgatcacatggtcctgctggagttcgtgaccgccgccgggatcactctcggcatggacgagctgtacaagtactcagatctcgagctcgctaggaatgcattagaggtccacacgaaccaggacccgctcgattaattaatcaccgttgtgctcacttctcaaatcgacaaaggaaacacacttcgtgcagcatgtgccccattataaagaaactgagttgttccgttgtggcttgcaggtgtcacatccacagaaaccggccgactctaaataggagtgtttcgcagcaagcagcgaaagtttatgactgggtccgaatctctgaacggatgtgtggcggacctggctgatgttgatcgccgtcgacacacgcgccacatgggtcaatacacaagacagctatcagttgttctagtcgaaccggttaacacaattcttgcccccccgagggataacttcgtataatgtatgctatacgaagttatggatcccatttgtagatacggttgcacacactagtctttgagggacagactccgatcctgcggtggtatgcgtgggttcgaaccgcgattgtggcaccagcaaaacttttaccgagcgaaaactgagcgattctacaaacaatatgggctcattcctattttttttcctgttatcacaatgccagaggccgtcataagaactgcttcatcattctcacacgtggccttcactgtggctcaaaatgaattttatccattgtttaaaaactgaagctgctttcaaccggaacacggcgtgaaaaatttttttgtttctcggactacacgttcactcatatatgccactggcgtttttacttcgacgttgttgcctttacggcagaattcacagttcaccgaacccggaaatggctttcgaatactctagggtagtaaagatcgttcgaagagtcgtcgggcttggggtgacaaggtttctaaacagagttggtttagacgcgtgttgattgccacgggcagggagcaactgcctctacggtttcgtggctcttgtggtactagataaacgcctgacagaaaaactgcggttgtgtggcatgcggcacggcgggattggccttgccgaagtaacgaggggaagagtcgaagacggtcgcagaaggtggaggcatcaaaaacggtgaaaagtgtgtttgccgggaccgccgtcaaaggagagtgtaccgtttgtactggtgccgtatgaactgaaacccgagcaatcctcctattaatgcattccaaattttgagttacgataacgggccttcggcacactatggctgcgatctcactatacagtgccgagagactctcacatgttctataactcgaagtagcacgccagcatctacaaacggatgtcgatagtgtcaccagagctctggctatcgggacaaaaagttttgcttctagtggcttgttgaaccgtcttcatcattgatgatggataccgtaggtacaacaagtgccacatagtagctgctggtagttgatgccgaggaacgtgagcacgtctttcttggactctactgctgaggccactgctgatgaggtgcctgtgtatgggggaagtgtaacgcacaccgttctggcaattgcgcttgaatccacacttgaacaaccatttctgcatgcgccgtgccgcatttggcacacctgcgtagtcccttggggtacttacgacaattttagattacacacatgttgacgagcaagcgtatctccgcgagcccaccgcatggcagtgaattcgctcggcgaaagtcgcagtcgcagatacgatttttttttgttccccccagtgcggtggaaatcgtggctggtgggcgcctgcgcggcgcatgcacaccgtggaaccgcaagacattctgcaggtttcccacccgttgtcttcctctcccttcaccgccgtaatcttgcgcacacgctggccgttgacggtcgaatggagctcgcgtgatcagaagatgtgtcccagatttcttgacctggcggaatgagacgcgaaagtcgagaagagtgacctcgcaaattcagcgggctggtaaacttcagggggtgcggcgataaaaccacttacagccagtggttgcccagcaatctgacctgtccgtcactgcacttcaccgaactgaggtccccaggaagtatagttcgtttcattttctgagcggtgctgtactcaaactgactccgggaactcactttctactgtgtgttagagctgatcagtgttctgtgaccatggcaatcggacgcggcggacaggattctcgtgcgctcaacccgagaatccttttgatatcatcatggaaaagatgcacccgcccagatgaggaaacagaagaagcagagccaccactacttctcgaggatgttcgagtcaagtctgggcatctcccaacgcgctgcgagccagctaatcagcaactgctcgagatcttgcttcctcatccgtcccaaccgagcattgttgtagcatttttatgggcgaactcaacactatatgaactgaatcagttcactcgtgacatggggctgacatcggttctcctgaggtcacctgaattcgtcttggggaacggttcgcttttggcagcgacaccttttgaccctctgtttattttcctcgctctgcttcatcgccacgccgccgagttctttgtccctttctcgcagctgatttcccagtgtgagtattctcacgaggttcgcaggaacctcgcgtggctggcgtccgcgccagcagtgacgcagcgaatctccctcgttgctgacgtccgctgcgccgacagttcgaccgttgatggcccgaccctggggggagaggcagtttctacgtcgctaggcgtgcaaccaattccagagttctgccgtctgaatgtgcggccgccaccgcggtggagctccagcttttgttccctttagtgagggttaattgcgcgcttggcgtaatcatggtcatagctgtttcctgtgtgaaattgttatccgctcacaattccacacaacatacgagccggaagcataaagtgtaaagcctggggtgcctaatgagtgagctaactcacattaattgcgttgcgctcactgcccgctttccagtcgggaaacctgtcgtgccagctgcattaatgaatcggccaacgcgcggggagaggcggtttgcgtattgggcgctcttccgcttcctcgctcactgactcgctgcgctcggtcgttcggctgcggcgagcggtatcagctcactcaaaggcggtaatacggttatccacagaatcaggggataacgcaggaaagaacatgtgagcaaaaggccagcaaaaggccaggaaccgtaaaaaggccgcgttgctggcgtttttccataggctccgcccccctgacgagcatcacaaaaatcgacgctcaagtcagaggtggcgaaacccgacaggactataaagataccaggcgtttccccctggaagctccctcgtgcgctctcctgttccgaccctgccgcttaccggatacctgtccgcctttctcccttcgggaagcgtggcgctttctcatagctcacgctgtaggtatctcagttcggtgtaggtcgttcgctccaagctgggctgtgtgcacgaaccccccgttcagcccgaccgctgcgccttatccggtaactatcgtcttgagtccaacccggtaagacacgacttatcgccactggcagcagccactggtaacaggattagcagagcgaggtatgtaggcggtgctacagagttcttgaagtggtggcctaactacggctacactagaaggacagtatttggtatctgcgctctgctgaagccagttaccttcggaaaaagagttggtagctcttgatccggcaaacaaaccaccgctggtagcggtggtttttttgtttgcaagcagcagattacgcgcagaaaaaaaggatctcaagaagatcctttgatcttttctacggggtctgacgctcagtggaacgaaaactcacgttaagggattttggtcatgagattatcaaaaaggatcttcacctagatccttttaaattaaaaatgaagttttaaatcaatctaaagtatatatgagtaaacttggtctgacagttaccaatgcttaatcagtgaggcacctatctcagcgatctgtctatttcgttcatccatagttgcctgactccccgtcgtgtagataactacgatacgggagggcttaccatctggccccagtgctgcaatgataccgcgagacccacgctcaccggctccagatttatcagcaataaaccagccagccggaagggccgagcgcagaagtggtcctgcaactttatccgcctccatccagtctattaattgttgccgggaagctagagtaagtagttcgccagttaatagtttgcgcaacgttgttgccattgctacaggcatcgtggtgtcacgctcgtcgtttggtatggcttcattcagctccggttcccaacgatcaaggcgagttacatgatcccccatgttgtgcaaaaaagcggttagctccttcggtcctccgatcgttgtcagaagtaagttggccgcagtgttatcactcatggttatggcagcactgcataattctcttactgtcatgccatccgtaagatgcttttctgtgactggtgagtactcaaccaagtcattctgagaatagtgtatgcggcgaccgagttgctcttgcccggcgtcaatacgggataataccgcgccacatagcagaactttaaaagtgctcatcattggaaaacgttcttcggggcgaaaactctcaaggatcttaccgctgttgagatccagttcgatgtaacccactcgtgcacccaactgatcttcagcatcttttactttcaccagcgtttctgggtgagcaaaaacaggaaggcaaaatgccgcaaaaaagggaataagggcgacacggaaatgttgaatactcatactcttcctttttcaatattattgaagcatttatcagggttattgtctcatgagcggatacatatttgaatgtatttagaaaaataaacaaataggggttccgcgcacatttccccgaaaagtgccacctgacgcgccctgtagcggcgcattaagcgcggcgggtgtggtggttacgcgcagcgtgaccgctacacttgccagcgccctagcgcccgctcctttcgctttcttcccttcctttctcgccacgttcgccggctttccccgtcaagctctaaatcgggggctccctttagggttccgatttagtgctttacggcacctcgaccccaaaaaacttgattagggtgatggttcacgtagtgggccatcgccctgatagacggtttttcgccctttgacgttggagtccacgttctttaatagtggactcttgttccaaactggaacaacactcaaccctatctcggtctattcttttgatttataagggattttgccgatttcggcctattggttaaaaaatgagctgatttaacaaaaatttaacgcgaattttaacaaaatattaacgcttacaatttccattcgccattcaggctgcgcaactgttgggaagggcgatcggtgcgggcctcttcgctattacgccagctggcgaaagggggatgtgctgcaaggcgattaagttgggtaacgccagggttttcccagtcacgacgttgtaaaacgacggccagtgagcgcgcgtaatacgactcactatagggcgaattgggtac

SEQ ID NO: 12 - DNA, 34 bp, artificial sequence
  recombination site
ataacttcgtataatgtatgctatacgaagttat

SEQ ID NO: 13 - DNA, 86 bp, artificial sequence
  primer
gcggccaagcttataacttcgtataatgtatgctatacgaagttatgatatgcatgtccgcgttcgtgaaatctctgatcaagcgg

SEQ ID NO: 14 - DNA, 98 bp, artificial sequence
  primer
cgacgcacgctgtcactcaacttgctgctagaactagtggatccataacttcgtatagcatacattatacgaagttatccctcgggggggcaagaatt

SEQ ID NO: 15 - DNA, 4694 bp, artificial sequence
  plasmid
tggcaagtgtagcggtcacgctgcgcgtaaccaccacacccgccgcgcttaatgcgccgctacagggcgcgtcccattcgccattcaggctgcgcaactgttgggaagggcgatcggtgcgggcctcttcgctattacgccagctggcgaaagggggatgtgctgcaaggcgattaagttgggtaacgccagggttttcccagtcacgacgttgtaaaacgacggccagtgaattgtaatacgactcactatagggcgaattgggtaccgggccccccctcgaggtcgacggtatcgataagcttgatatcgaattcctgcagcccccgagacgcgtgttctaaccacaaaccttgagacgcgtgttccaaccacgcaccctgacacgcgtgttccaaccacgcaccctgagacgcgtgttctaaccacgcaccctgagacgcgtgttctaaccacgcaccctgagacgcgtgttctgccgcacaatgtgcacctgtaggaagctgtagtcactgctgattctcactgttctcggcaagggccgacgaccggagtacagtttttgtgggcagagccgttgtgcagctttccgttcttctcggttgtgtcacatgtgtcattgtcgtgtaaacacacggttgtatgtcggtttcgctgcaccacttcattatttcttctggttttttgacgagtatgcatcccaagaagaagaggaaggtgtccaatttactgaccgtacaccaaaatttgcctgcattaccggtcgatgcaacgagtgatgaggttcgcaagaacctgatggacatgttcagggatcgccaggcgttttctgagcatacctggaaaatgcttctgtccgtttgccggtcgtgggcggcatggtgcaagttgaataaccggaaatggtttcccgcagaacctgaagatgttcgcgattatcttctatatcttcaggcgcgcggtctggcagtaaaaactatccagcaacatttgggccagctaaacatgcttcatcgtcggtccgggctgccacgaccaagtgacagcaatgctgtttcactggttatgcggcggatccgaaaagaaaacgttgatgccggtgaacgtgcaaaacaggctctagcgttcgaacgcactgatttcgaccaggttcgttcactcatggaaaatagcgatcgctgccaggatatacgtaatctggcatttctggggattgcttataacaccctgttacgtatagccgaaattgccaggatcagggttaaagatatctcacgtactgacggtgggagaatgttaatccatattggcagaacgaaaacgctggttagcaccgcaggtgtagagaaggcacttagcctgggggtaactaaactggtcgagcgatggatttccgtctctggtgtagctgatgatccgaataactacctgttttgccgggtcagaaaaaatggtgttgccgcgccatctgccaccagccagctatcaactcgcgccctggaagggatttttgaagcaactcatcgattgatttacggcgctaaggatgactctggtcagagatacctggcctggtctggacacagtgcccgtgtcggagccgcgcgagatatggcccgcgctggagtttcaataccggagatcatgcaagctggtggctggaccaatgtaaatattgtcatgaactatatccgtaacctggatagtgaaacaggggcaatggtgcgcctgctggaagatggcgattaattaatcaccgttgtgctcacttctcaaatcgacaaaggaaacacacttcgtgcagcatgtgccccattataaagaaactgagttgttccgttgtggcttgcaggtgtcacatccacaaaaaccggccgactctaaataggagtgtttcgcagcaagcagcgaaagtttatgactgggtccgaatctctgaacggatgtgtggcggacctggctgatgttgatcgccgtcgacacacgcgccacatgggtcaatacacaagacagctatcagttgttttagtcgaaccggttaacacaattcttgcccccccgagggggatccactagttctagagcggccgccaccgcggtggagctccagcttttgttccctttagtgagggttaatttcgagcttggcgtaatcatggtcatagctgtttcctgtgtgaaattgttatccgctcacaattccacacaacatacgagccggaagcataaagtgtaaagcctggggtgcctaatgagtgagctaactcacattaattgcgttgcgctcactgcccgctttccagtcgggaaacctgtcgtgccagctgcattaatgaatcggccaacgcgcggggagaggcggtttgcgtattgggcgctcttccgcttcctcgctcactgactcgctgcgctcggtcgttcggctgcggcgagcggtatcagctcactcaaaggcggtaatacggttatccacagaatcaggggataacgcaggaaagaacatgtgagcaaaaggccagcaaaaggccaggaaccgtaaaaaggccgcgttgctggcgtttttccataggctccgcccccctgacgagcatcacaaaaatcgacgctcaagtcagaggtggcgaaacccgacaggactataaagataccaggcgtttccccctggaagctccctcgtgcgctctcctgttccgaccctgccgcttaccggatacctgtccgcctttctcccttcgggaagcgtggcgctttctcatagctcacgctgtaggtatctcagttcggtgtaggtcgttcgctccaagctgggctgtgtgcacgaaccccccgttcagcccgaccgctgcgccttatccggtaactatcgtcttgagtccaacccggtaagacacgacttatcgccactggcagcagccactggtaacaggattagcagagcgaggtatgtaggcggtgctacagagttcttgaagtggtggcctaactacggctacactagaagaacagtatttggtatctgcgctctgctgaagccagttaccttcggaaaaagagttggtagctcttgatccggcaaacaaaccaccgctggtagcggtggtttttttgtttgcaagcagcagattacgcgcagaaaaaaaggatctcaagaagatcctttgatcttttctacggggtctgacgctcagtggaacgaaaactcacgttaagggattttggtcatgagattatcaaaaaggatcttcacctagatccttttaaattaaaaatgaagttttaaatcaatctaaagtatatatgagtaaacttggtctgacagttaccaatgcttaatcagtgaggcacctatctcagcgatctgtctatttcgttcatccatagttgcctgactccccgtcgtgtagataactacgatacgggagggcttaccatctggccccagtgctgcaatgataccgcgagacccacgctcaccggctccagatttatcagcaataaaccagccagccggaagggccgagcgcagaagtggtcctgcaactttatccgcctccatccagtctattaattgttgccgggaagctagagtaagtagttcgccagttaatagtttgcgcaacgttgttgccattgctacaggcatcgtggtgtcacgctcgtcgtttggtatggcttcattcagctccggttcccaacgatcaaggcgagttacatgatcccccatgttgtgcaaaaaagcggttagctccttcggtcctccgatcgttgtcagaagtaagttggccgcagtgttatcactcatggttatggcagcactgcataattctcttactgtcatgccatccgtaagatgcttttctgtgactggtgagtactcaaccaagtcattctgagaatagtgtatgcggcgaccgagttgctcttgcccggcgtcaatacgggataataccgcgccacatagcagaactttaaaagtgctcatcattggaaaacgttcttcggggcgaaaactctcaaggatcttaccgctgttgagatccagttcgatgtaacccactcgtgcacccaactgatcttcagcatcttttactttcaccagcgtttctgggtgagcaaaaacaggaaggcaaaatgccgcaaaaaagggaataagggcgacacggaaatgttgaatactcatactcttcctttttcaatattattgaagcatttatcagggttattgtctcatgagcggatacatatttgaatgtatttagaaaaataaacaaataggggttccgcgcacatttccccgaaaagtgccacctaaattgtaagcgttaatattttgttaaaattcgcgttaaatttttgttaaatcagctcattttttaaccaataggccgaaatcggcaaaatcccttataaatcaaaagaatagaccgagatagggttgagtgttgttccagtttggaacaagagtccactattaaagaacgtggactccaacgtcaaagggcgaaaaaccgtctatcagggcgatggcccactacgtgaaccatcaccctaatcaagttttttggggtcgaggtgccgtaaagcactaaatcggaaccctaaagggagcccccgatttagagcttgacggggaaagccggcgaacgtggcgagaaaggaagggaagaaagcgaaaggagcgggcgctagggcgc

SEQ ID NO: 16 - DNA, 1057 bp, bacteriophage P1 Escherichia coli
atgcatcccaagaagaagaggaaggtgtccaatttactgaccgtacaccaaaatttgcctgcattaccggtcgatgcaacgagtgatgaggttcgcaagaacctgatggacatgttcagggatcgccaggcgttttctgagcatacctggaaaatgcttctgtccgtttgccggtcgtgggcggcatggtgcaagttgaataaccggaaatggtttcccgcagaacctgaagatgttcgcgattatcttctatatcttcaggcgcgcggtctggcagtaaaaactatccagcaacatttgggccagctaaacatgcttcatcgtcggtccgggctgccacgaccaagtgacagcaatgctgtttcactggttatgcggcggatccgaaaagaaaacgttgatgccggtgaacgtgcaaaacaggctctagcgttcgaacgcactgatttcgaccaggttcgttcactcatggaaaatagcgatcgctgccaggatatacgtaatctggcatttctggggattgcttataacaccctgttacgtatagccgaaattgccaggatcagggttaaagatatctcacgtactgacggtgggagaatgttaatccatattggcagaacgaaaacgctggttagcaccgcaggtgtagagaaggcacttagcctgggggtaactaaactggtcgagcgatggatttccgtctctggtgtagctgatgatccgaataactacctgttttgccgggtcagaaaaaatggtgttgccgcgccatctgccaccagccagctatcaactcgcgccctggaagggatttttgaagcaactcatcgattgatttacggcgctaaggatgactctggtcagagatacctggcctggtctggacacagtgcccgtgtcggagccgcgcgagatatggcccgcgctggagtttcaataccggagatcatgcaagctggtggctggaccaatgtaaatattgtcatgaactatatccgtaacctggatagtgaaacaggggcaatggtgcgcctgctggaagatggcgattaat

SEQ ID NO: 17 - DNA, 214 bp, Toxoplasma gondii
acaatgtgcacctgtaggaagctgtagtcactgctgattctcactgttctcggcaagggccgacgaccggagtacagtttttgtgggcagagccgttgtgcagctttccgttcttctcggttgtgtcacatgtgtcattgtcgtgtaaacacacggttgtatgtcggtttcgctgcaccacttcattatttcttctggttttttgacgagtatg

SEQ ID NO: 18 - DNA, 6334 bp, artificial sequence
  theoretical sequence
ggaaacgcataaatctggagacaccacgaaacaaatgggccacagcagcgtcttgcagattctcgaaagatgtggaaatgagaaggaaaggcatccctacgtctccaagaggacgtgaagcgccgtgaacgacgtacaaaacctctacacgcgggcgaccggtgttgggactggggagaacgtttctctcggcagcgcagcacgccttaattgcgagagagagctgtgctgggttttttgtcgagagcggagacacgctgccttggcatttccgcgttgaaccatttccaaatccacaggcagtgaggctgtggcgcgtcctctccgtggttttgcaggtgcatgcgaaagagttctctcatcggcccattctcaattcgtcacttgtctgggcttggatcccacgactcaacttctcgcgagcggtgaggcgatgacactgcacgtggcagggaaagcggaagaaaggtgggaaacacgggtgccgcatgcgcgagctttgcgtgcatgcaggctcccgcgtaaatccaactcgccacgttcctgacgttgatcacactttttctttttgttcaactgcgacagaggaaagtgtcagtggtagagactgccgacattcctctctcgcggatgttgtaaacacctcagcaggttccctcatatatccatataattatgtcgggatgtgtgctcccaaattcatctcggcctctaaaatcggcctctttaaaatcggtacatcgctggacgtctctcggtgcatgtgaatatgctttaaccgtgacagcgttcgtgtaagaccgttgatacgtggcacaagaacggcccaacttggtgagatgcgctggcgaacccgttgcattcacgcgggaggcataagtcgcctggagggcgcataggagcgggaggtttgcagcgctgtgtatttcgctgccgcatgggaagttgaatccagtggtgtgaggattggcgtacacatttccgtccacgctcggtctgtaaaaagccttttcatagctagtagtgaatacgtgtccattccgcatttgcggcgcgcgtgtggttcctgcgtctgcgacagtgactttcctgtcgatccgaatacggtcaggatattgaaatccaacagggctgttgtttgattcgcgtgtttctgttcgcaccttgttcttgcatgtgggctctttcgttctttggtcgattttctcaggatccctcgactgcacagtcaagctctggagctgtaatcgtgctcagcagatggaactggcggagaaggagttgaaaggagatggacctgcgtgaagtagcgcctcccccgttcgctttaagcttttccgtcagatccacccgtttcctatgctattttcgatgcgctttcagttcgacttccctggttttcttcgaattcgcaccgtctcccaatgcaccagtcttttcacctcttttctagcatcttctgttttggggggtcgggcggcgcagggcgtcccccagtcacagtagtcggcagaggtacgcgccgcgtccacgcagaggtcttcttcctggtgggtgcatagggatgcatgtgctttttagagttgcatgcgtgtgttttcccatttgtggatatacgtacatgcatatgtgcacgcgctcgcaaatttatgggataggcattcgacaaacacaccgtaggaacgccatctgatgccaccaacggagcagtgtagagctgaatattcctgtccctcgtatgtactgaacgaaactaatctattgtcgccgcaatagcgagaaggtaacttgaggtgcacagactggagggaggcataacggaaacatttcatcagaagccttcacacggcgaaggtgcgaaaattcccgtgcctccttttttcccacatctgcgattccaaattcgtgactcccctacctcgcgcatccgttaaaggcaacgttctcaccagtacacggaagcaaacgtccgcatacacttctctttgagaagggggatcgtaaaaggccccgaaaaatcctacagttccctcgttcttcgcaccgcagccagcacaaaatgcaggaagcagagagccgcgggaagggcaagtgacatatgagatgtgtgtcgcgaactgatggcttcggcccatcttcgccgtcgtattgaacagagttttctggccacgcgaaaagcacggcgaagtgtcgcatggaaacgtctcctcggcctgtcctccaaaaggagagcctcactcaacatacgttgctcgatgggaccatgcctatttagcgagcgctacgtccttttgtcgtttctatacaccgagtcatgcttacgttccgtgtatttctgtctcactgcatactttgaatcagttcaaaagagtattcgcgctctaaatacccccccgaaaatggcgattcggacggtcctgatctcgctagcaaaaaaagtagtcgtttgctctcgagtgcaactgcctgatgtatcggtgttttagtgtgtgtctgcagcctttcccttatctcggctgtggagcctgtttgtgaaaaagagttgattcagctccatcgcgaggaaaaatcacagcggacacctgacggacgctttcgatccacttttcgtgtggcctcgtcccgggagtttcgcgcatcccccgcgtccttgcccacttgaaatccgttttttataccggcaaaacccggatacgccggagaaacagctgtgcaggggagctctaaatctcctcccacgggaaggaggccgcgaacacgccggctgctgaggaagatgtaccggtggaagttgccgagaggacgttttccgcaggaaaatgagcatcactttcttgcaaccgccgtcccggtcgtcagctaggttgtgtgtgtcaaccccagccaagcgcgacggggttagctggagcgtcgctgtctgtgcagttttttcagttcgtcatcgaccgccggaactagtagtcgtcggccatttcggtccctggtccacggtcacggggtttctccgaaaagtgtgtgctaggaccgacacccggcgtcgcgcgcgacggacagcgagtcatttccaagggttatagctcatcgatgaagcttataacttcgtatagtataccttatacgaagttatggatctagacatgctgatgaagaagggaagttcctgtaattgccggcgacagacttgtgtccgtgttagatacgcagaacctctgcttggggatgggagtcgaaggctgagcctacgtttcctatcggactgtgacctgccacgccgtcttccctgtgatgtattttcttcgtcccgacggctacgaaaatgttctgcggccacgaggccccgcagttctatcctgtgtgtgttttatttgcttgtctgaggaaaaaccctgctggacgcccatcctaacaagttgacgtgcagcttgagtggatcattttgggtgtacattcgagcacgatgttcactgctccagcttacgccggcgagcgaagaacgcaccgtattccagtcacccactagtagagaaacagccaacccggacactttccgcgcatgactcgcgtagggccgcaggccttctcgtccatcaacggcattatctttcgagaaatgaggacacaggcgtgaacagtgcttgactcgagcagtgccgctcaactgccagctcgactagtttgctatgacacgagtacgctttctttaacattttgttgcggggggctgtcttatttttttcacattcctccccccctctcaagctcatgcctaggatgctgacacaaacacaacctttttgcaagagaagatattctctaaaacagccgtatgaaagctatgagggaatctggttggcactacacttcattgccgttttgtttgtcggttccctggatgctcgtgtcgctgtatcctcaactgttaagagccacgaaatcaacaggacttatggagactgttctcgactttctacgagcgttgcttgaccgacggatatcgcctcacgaaaacatttgcaactcctccgagttatcccctgcttatccttccgcttctctcgatctccagtgtgtgctgtccattccctcacacctttctggcttcgcgtgccgttcccctgccctcttttcatcggagctactttattcgtctctctcttgctgtccgttgtccgcattcgtccagtggtctgcgggactaactactcagccgactcgatgcgcttgcgcttcgcggcgcagtctaagacatgtttggaaagtaggtgtgtttaccaggcacctagatcaaatcccaactgcccatattctgaggcagtctacgtatatacagacataggaatgcatgcagccttcggctggccaacctcgtgcacgcgtgctggctaactcagctctgcgccatggaagcaggccctcacctttccttttgcgtcgaaagcttgctgtctttcgtcgttgtccctccattccctggaagcaaaattccttcccgggtgagctgggtcctcgtattgagctatgaccagggacacagggtctccgccgccgaagaaaccatctccaggcggcgcgtgtggtccggtgtctcgccgctagctctggaggtttcattccttttggcgtttgccacggaagacagtgtgtccacaccggcggcggcaaactgtcacgacacatgttcttttgagatgcagtctcagggccggaacatctgactcctcgcgacagccccggcgcacaggagcttctccggagtccttgaatcgcgctgtccagattcgcttccacgccctcgccccgagaaaacactcagctctcgcaatcgaacggcacgaaaaaaagccaagattgcttctttgtgcggaattcgaacaccgtcgctggttttcgcctgcgcgacttctgcgctgacccacatggtgtgcatctagtcgatttccgtggcgctccgcatgcggtgcggcgggccctctcagtctacgcgcgaaacagacaaggccgagaacaaccgtcctcggatgctctgtacacaccgtcctagatgcgcaaaaatgggaaaacgaactgtttcgcgctttttgcgtgcttctacgggagccttccgtcgagtcaaatgcgacttcccgcaagaacggaaccgtagtctctcctttccttaagcctcccgcgctgtttatgtgttcaatcggcgacgcggctactttttcctcggcagccccgccggaatccaaagacacatgctggtctctttacgcgtcgcttttgttcagcatttcgtggccgtttccatctgtgtgtatatttctctaaggcgcaaggataaacgtgctcggcaatcctgctcgccgtcgcggaaagtccgcctttcctgcgcctggcgcccgcaccgtgaggacagccggcgacagcctccaagagttgcaacgaacgcgcctctcctctctttttttccctacttggcttttttgtgctcctccaccttatttcgcgacgctacgccggccatttctcgtcttccctcgcttcttcgctgcctcttcccccgttctcctgacacatcccccgctagacgcgcaacgtcagtgtgcaggctctcgcctgtcggatatcgcagttccggtctcgaagacttcaggagagaacgcagcgctcctgcgtgtccaggatacgtagcggacgcttcggaagatcggaaggagaactctgcgagaactgcacacgcctctgcagaggtgctctcgcgcgcgatccagcgttgcagagctttctaagctgaggaaggggaagaaaacggaactgacacaacgtccgaccggcgatctacgagcgagggaccagcgaggaacggccgcgaccgcgacagcagacgagtcgagcccgtccgggacgggaggtttgtttcggacagcaggaagagagatggacggctaggcgagggagaagagagtgaaagaactgtttcagcgaatctgcggagtctcgaggagagccgaaacgggaagaggaaacccaagccagggccttttctggatcacctgtaaacacggacgccgcaacacggattgccgaagcaagagagacacagttttccgagacctagagcagtcaagactgttgtgatggcatttttgctccttcccttcgcatccgccgcgatggcggggacgtcatacgatgcgtccattggcctactttccgatgcctcctttttgtcgactttggttgcctccttcttcgtcattatctgctccgagctcggcgataaggtcagtctcctcccgcgctccgtgcctctctacagcgtatccaccgtctctgctttctttcctgttcc

SEQ ID NO: 19 - DNA, 5391 bp, artificial sequence
  theoretical sequence
atacgaagggattcgacgtgtgcctttttctagaggtcaacaaccgaactcacgggaaataacagcgaaagtgtccaatcgaacttcgcggctggtctcccgttccaaatgtgtaacgcggaacgggaccaatacagcagcacggaaggagcagacaggataccctggcaaactacatgagaggaacgctcgaaatttcagcggaaaaaaggaaacccacgtcgggacaatactttgtttgtcgccggctgtcagcgcggtgctcgcgtccaccggagaaaacggagttgttgcacaaagggaggactgccgagcgcggttacccatatggtccatggaaacacacctccatcgaaaccggcatgaaatctggatcaagaaccgtgacgccagttgtcatgtgtcttcggaggtcttggagggctgtcgacgagaatatacaaagcggcgcgtcgccttcgagcgtagcgcaggatgttttcaatcaagaaaaatgaagtagttccggaggccggattcaactgaactgaattctccaccggtggaaagtcgatgaaaactgcggcaagaaacagattgtgtgtccacttcgctcgacgcatggagtgtctgtacaccctccggtgactttctgttgcgcttgtctacttcgtaaaatgagcagaagctgccagtgcatgcaacgcggagaaaatcggcgactagatgcacaccatgtgggccagagatgtagaagcccgggaagaggaacgagtaccagatatttcacgcaaaaaaatctcagattcttgtttgaagccgcgtgtgaatttcggcgcgtgcgcatggacctggaagtaactctgaaaggcgcgatttcgtgggcagcaaagaagtccgggccgtgaagcactgtctcgacgcaatgctttgacaaactgagaatgcatcttttaacggatatgtgactgcccgatagtagcctgtagttggtggtcgcacactgttttctgggccaagagttaaatgctagacaacacacacagaacaagcgacgcagcgcgttggaagaaactagccgagatgacggttccgtttgctgtggagaacgttgttttacgtggaggcttcgtggctctcaagaaatcaactcactaagcaatttctatcggcactcttcttccggggagtaatggagagtggacagcaaaccagcactctgcgagggacgtagaaatgcgtagatcgatttcagtgcacaacattgctttttcgaacgcaaaaaaacacgtatttggacgcccaaaagctacgcattcacgctgggaaaaacatggagtgcattcggatgtacatagaacgcctccaaatgtgcgcggcatgtcgagaattggccgcgaggcctcacgtttgttattgtgtctcaaaaaatcccgtgaaatgtgagaggttctaggctcctcgagattccccgaaaacactgaacacgtcgggaaacggagagttgagatgcacggaagcaaagaagctatgggaaaaggaggggatgggaggagcgggcgcaatgcagcaaataagacggagagaatggaaagagcgttggagaagagaggcaagacagaaaaacggagccaggccaccgcggaaatggggcacacggcttccttctatgatgtctacacaaatacagctggtcgaatattgagcacaacgctcacaagccgtgtcaaggacccagtgaagctcgtagacaaagaaacgacgaaaagccaacaaggaagcacagtgccgaccagacttcctgccgtaggtttcagtcagatatgtgtggagtgtacaactaccctagacaaaggaagtcttgtttcagcagctttgtatgcgactgtagaaagggtagaggaataggaagaatccgatagcactgacggagacagaatgacataagaaggtatactcgactgtcacgaaaacacttgtcgaaaaattggtggaagagcactcacagaagagcaccattacgtccattcccgcatttctctcagaaattgccccggggagacgagactgtttgcgagtgcacctcagtcaaacgcagcaagtgtcggcgttggctgcttctcaagtagctgctgactcgaacgtacattttcggatcgcttgcctacagcgaaacggcgatcattgtattggagtaaacgcagcaacagatcccttgttctacaacgagcaaaatgtgtaaaggcaggcgatttccccagaggttgacaccgacaaagcaggttctcatagaatgaagaggccgcacctcctagtggcagaagcgttcttttcgtaggcacttcggcagagatgtctcacgtttgatgggttcttatttcatacatggttgggcggtttaggctttcagactcgagaaccatcagaattcaaactttgcacgcggcaaaacgcgggggtaaccatgtcgtgtgtcggtggtaattagtgaggcagtcttgctttagttggcagtgtgtcctcatgttttccctcgctgtctgcgtaaaggcacacaatctactttgttttacctgaactcggttcacaaacctaacgttctcggtacaaacccatctgtgtatccgcgtgtgagccgatcgcttcgttgcagaacttctttctaggccaaggccactattgccagcggcacaaatcgaaatattctcaatccttggcttagtgtggagactttttacttcgtgttactattgtttctcgagtcaaactctgcatcttgtctttgcgctgatctccgctctcagagactcgctgaagcttataacttcgtataatgtatgctatacgaagttatggatccactagtttacgtatcgcgactagcagcaagttgagtgacagcgtgcgtcgtgcgacagggcaagtgtaccaaaagtcacatcggaggtgtaccggtgaacgaaggaggttagaaacagaagtgacacgagctagactcgaccagagagtcttttttcaccgagcaaggggacgcaatgctgctgactcgatgaacgctcttcagtcccggctggcgacgtcgagcaactggccggtcattgcgacgcgagaatgcgacgcgagaatgcgacgcgacacaccagagacccgtggtctcctatttaggtgggttccggtgacacgtctgtcgagtttttagcagcatgttgcatcacccccgtcgctcgagccattgcagagctaccaagcacgagtggttacctagcaattgaagatcgaatcacgcctgtgttgcggcgtgattgcacgactcccctaaaagcgacactgcagctcatcgagctccgtgccaatggcggggacgagggtgtgatacttgttgaccaggcgggacagcggccgctaacagtgcacagtgaggtctgatgaacacactggaaactctgtgacctttcgcgcagcaccgtcaacgacagttgtctcccgatttctgcggaggggacgcttccctgcgggcgtcgtccgtgtcgaccggcttgttttttcccgtaggagtctatggcaaaacttgacggtaggacacgattttggtgagcaaaaaatgaggccgaaggcggaaaaactcaggacgaggaaagtaggcacagtgaggccttccacaagggcactgctgccgcttttaaaaaggcgagttcaactagcttacagggaaatgattctctgccgagagcctgaatcgcaacataacgactctgaacctgatgcatttccaaaagtcgcgtgacacgcaacttcttggcacacggtgcacaccagaatcgccaccaaagagacggagcggggcttgccgccgacagaagcgacgcacacgccactcttctgcttcacatctctgtgcctctggagttgtgtgtgtcacaagcgagtgaagaagttcgcattcgttgtccagcaaaacgggacgaagccttcacttcgtgagtggagagtcgagcggccttccatgtgacctttctgttcgcccccccccccccccccactttcctccgtgtgccgccgtacctgtcatcctaggcgtggagagagagtgtgtataatgcagaagttatcggcggcattttacgttatcgtctctcatctcaaaaacgtctacactgacatctacttcctcctacgcgctgctgcgggtgtcacctaagggacatttacacgcggtgtggagtcataccaggggtgtgaaatgcagggaaaagtacggaagaagagaagactagacttctcggtcctgcgccctcactcgggggggtctgctaaactccgtccgtttcgactcctatgagccgcgcttctcaaggatttaccttccagctgtttcggagacaaaagatttgtttcctccgagaaccacatcgactagacaacaaccgatgtgaccatgggtgtcagcagatgccgtacacacggggggtaagtcgtatgcatacctcgcaagtccacacattggtgtgcttgcatccatttttgaaagcatacgcatgcacttgtatgcaccagcatgacgaccgctgtggacgccccgtgcttctctgaaaacttgtgtgaacttgtttgcttcgggatgcctctcccgaccccaaaacagaggaggtcggaggaacaaaggaaaagtacggtgagtgagcgacgatgcagggtccagaaactaggtaagtccagcgaaacgaatagaagctgaacagaaatggcaacgggaacgggcaaatttgactgggaaactcaaggcgaagacagtggacatctcgtcatgcaggtccttcacttttcttcaactgtttctcggcgagttccttctgctgagcgcgattgcagctccagagcttgactgtgcagtcgagggatcctgtacagtcgacaacaaaatacagaagcagcggaaacaacgaatgtgcgaaagagaaacatgtggaaagaaaatgtcctcgaaaaaggaggaacaacccacgcgccgtagataaaagagagactcatctatgcgcggtcactaccttacttgccaatgcagacatacggtttcttggatccgtcggcaaacctactgtgcacggacttaggtgcatgggtaaacacatgaaaagagaaaggcttatttcgaacccccagctctgcagccctgtcgcttatcggtttgccttcttcatgtgatagctgccttccacctcacatgcgggtgcttctctcatccactccgattctatcaaatttccctgtcgtcacctcaatggcctcacacatacatacagtgaaaccgaacatattcagaggcactgggaggcataatgcgatgtgccaatcttcacatgaagcaaaaagaattgttcttcccaagaggaattcgagcactcatccgcatat

SEQ ID NO: 20 - DNA, 20 bp, artificial sequence
  primer
acccggagaattatcgccta

SEQ ID NO: 21 - DNA, 18 bp, artificial sequence
  primer
ttctccaggcactcacct

SEQ ID NO: 22 - DNA, 21 bp, artificial sequence
  primer
tttcccttctaaacacagtcg

SEQ ID NO: 23 - DNA, 22 bp, artificial sequence
  primer
ccttcagtggttctccatgagt

SEQ ID NO: 24 - DNA, 24 bp, artificial sequence
  primer
gaaagtgtcagtggtagagactgc

SEQ ID NO: 25 - DNA, 20 bp, artificial sequence
  primer
ccgtttggtggatgtcttct

SEQ ID NO: 26 - DNA, 20 bp, artificial sequence
  primer
gcatcgacttcaaggaggac

SEQ ID NO: 27 - DNA, 24 bp, artificial sequence
  primer
tgtttacaggtgatccagaaaagg

SEQ ID NO: 28 - DNA, 20 bp, artificial sequence
  primer
ccgagcaagttagcaagtcc

SEQ ID NO: 29 - DNA, 20 bp, artificial sequence
  primer
cttgtccgtcacatcgtttg

SEQ ID NO: 30 - DNA, 20 bp, artificial sequence
  primer
ggcgacatactgcattggat

SEQ ID NO: 31 - DNA, 20 bp, artificial sequence
  primer
gatcggagtctgtccctcaa

SEQ ID NO: 32 - DNA, 25 bp, artificial sequence
  primer
gtcatcgaccgccggaactagtagt

SEQ ID NO: 33 - DNA, 26 bp, artificial sequence
  primer
gcagaggttctgcgtatctaacacgg

SEQ ID NO: 34 - DNA, 9931 bp, artificial sequence
  plasmid
  misc_feature (827)..(827): n is a, c, g, or t
ctgacgcgccctgtagcggcgcattaagcgcggcgggtgtggtggttacgcgcagcgtgaccgctacacttgccagcgccctagcgcccgctcctttcgctttcttcccttcctttctcgccacgttcgccggctttccccgtcaagctctaaatcgggggctccctttagggttccgatttagtgctttacggcacctcgaccccaaaaaacttgattagggtgatggttcacgtagtgggccatcgccctgatagacggtttttcgccctttgacgttggagtccacgttctttaatagtggactcttgttccaaactggaacaacactcaaccctatctcggtctattcttttgatttataagggattttgccgatttcggcctattggttaaaaaatgagctgatttaacaaaaatttaacgcgaattttaacaaaatattaacgcttacaatttccattcgccattcaggctgcgcaactgttgggaagggcgatcggtgcgggcctcttcgctattacgccagctggcgaaagggggatgtgctgcaaggcgattaagttgggtaacgccagggttttcccagtcacgacgttgtaaaacgacggccagtgagcgcgcgtaatacgactcactatagggcgaattgggtaccgaggtcatgagcggaagtgggcagtgcatgcaacgcggagaaaatcggcgactagatgcacaccatgtgggccagagatgtagaagcccgggaagaggaacgagtaccagatatttcacgcaaaaaaatctcagattcttgtttgaagccgcgtgtgaatttcggtgcntgcgcatggacctggaagtaactctgaaaggcgcgatttcgtgggcagcaaagaagtccgggccgtgaagcactgtctcgacgcaatgctttgacaaactgagaatgcatcttttaacggatatgtgactgcccgatagtagcctgtagttggtggtcgcacactgttttctgggccaagagttaaatgctagacaacacacacagaacaagcgacgcagcgcgttggaagaaactagccgagatgacggttccgtttgctgtggagaacgttgttttacgtggaggcttcgtggctctcaagaaatcaactcactaagcaatttctatcggcactcttcttccggggagtaatggagagtggacagcaaaccagcactctgcgagggacgtagaaatgcgtagatcgatttcagtgcacaacattgctttttcgaacgcaaaaaaacacgtatttggacgcccaaaagctacgcattcacgctgggaaaaacatggagtgcattcggatgtacatagaacgcctccaaatgtgcgcggcatgtcgagaattggccgcgaggcctcacgtttgttattgtgtctcaaaaaatcccgtgaaatgtgagaggttctaggctcctcgagattccccgaaaacactgaacacgtcgggaaacggagagttgagatgcacggaagcaaagaagctatgggaaaaggaggggatgggaggagcgggcgcaatgcagcaaataagacggagagaatggaaagagcgttggagaagagaggcaagacagaaaaacggagccaggccaccgcggaaatggggcacacggcttccttctatgatgtctacacaaatacagctggtcgaatattgagcacaacgctcacaagccgtgtcaaggacccagtgaagctcgtagacaaagaaacgacgaaaagccaacaaggaagcacagtgccgaccagacttcctgccgtaggtttcagtcagatatgtgtggagtgtacaactaccctagacaaaggaagtcttgtttcagcagctttgtatgcgactgtagaaagggtagaggaataggaagaatccgatagcactgacggagacagaatgacataagaaggtatactcgactgtcacgaaaacacttgtcgaaaaattggtggaagagcactcacagaagagcaccattacgtccattcccgcatttctctcagaaattgccccggggagacgagactgtttgcgagtgcacctcagtcaaacgcagcaagtgtcggcgttggctgcttctcaagtagctgctgactcgaacgtacattttcggatcgcttgcctacagcgaaacggcgatcattgtattggagtaaacgcagcaacagatcccttgttctacaacgagcaaaatgtgtaaaggcaggcgatttccccagaggttgacaccgacaaagcaggttctcatagaatgaagaggccgcacctcctagtggcagaagcgttcttttcgtaggcacttcggcagagatgtctcacgtttgatgggttcttatttcatacatggttgggcggtttaggctttcagactcgagaaccatcagaattcaaactttgcacgcggcaaaacgcgggggtaaccatgtcgtgtgtcggtggtaattagtgaggcagtcttgctttagttggcagtgtgtcctcatgttttccctcgctgtctgcgtaaaggcacacaatctactttgttttacctgaactcggttcacaaacctaacgttctcggtacaaacccatctgtgtatccgcgtgtgagccgatcgcttcgttgcagaacttctttctaggccaaggccactattgccagcggcacaaatcgaaatattctcaatccttggcttagtgtggagactttttacttcgtgttactattgtttctcgagtcaaactctgcatcttgtctttgcgctgatctccgctctcagagactcgctgaagcttataacttcgtataatgtatgctatacgaagttatgatatgcatgtccgcgttcgtgaaatctctgatcaagcggagtgatcaggaatcatcgtctcagcgggatgacgttgcggagcaggccggctcgcggtgggcagtcagatgccgaaggcgtaactcaggacggcttgcgctcatcgcagaacaggggtggtgcctgcattgggtgcggttggtgatcctggttggaccggtggagatgcgcgcgcacgaaggggatgtgtcagaaacattttgtttgttctctgtgaacttttagatgtgttaaaggcggcgaatattagcagagagtcctccttgttggattctctcttgaatttcgccctttccttctctttgcgagtctcgtagagaacaagcactcgttcgccgtccctgacgacgcaacccgcgcagaagacatccaccaaacggtgttacacaatcaccttgtgtgaagttcttgcggaaaactactcgttggcattttttcttgaattccctttttcgacaaaatgcatgagaaaaaaatcactggatataccaccgttgatatatcccaatcgcatcgtaaagaacattttgaggcatttcagtcagttgctcaatgtacctataaccagaccgttcagctggatattacggcctttttaaagaccgtaaagaaaaataagcacaagttttatccggcctttattcacattcttgcccgcctgatgaatgctcatccggaattccgtatggcaatgaaagacggtgagctggtgatatgggatagtgttcacccttgttacaccgttttccatgagcaaactgaaacgttttcatcgctctggagtgaataccacgacgatttccggcagtttctacacatatattcgcaagatgtggcgtgttacggtgaaaacctggcctatttccctaaagggtttattgagaatatgtttttcgtctcagccaatccctgggtgagtttcaccagttttgatttaaacgtggccaatatggacaacttcttcgcccccgttttcaccatgggcaaatattatacgcaaggcgacaaggtgctgatgccgctggcgattcaggttcatcatgccgtctgtgatggcttccatgtcggcagaatgcttaatgaattacaacagtactgcgatgagtggcagggcggggctcctaggatggtgagcaagggcgaggagctgttcaccggggtggtgcccatcctggtcgagctggacggcgacgtaaacggccacaagttcagcgtgtccggcgagggcgagggcgatgccacctacggcaagctgaccctgaagttcatctgcaccaccggcaagctgcccgtgccctggcccaccctcgtgaccaccctgacctacggcgtgcagtgcttcagccgctaccccgaccacatgaagcagcacgacttcttcaagtccgccatgcccgaaggctacgtccaggagcgcaccatcttcttcaaggacgacggcaactacaagacccgcgccgaggtgaagttcgagggcgacaccctggtgaaccgcatcgagctgaagggcatcgacttcaaggaggacggcaacatcctggggcacaagctggagtacaactacaacagccacaacgtctatatcatggccgacaagcagaagaacggcatcaaggtgaacttcaagatccgccacaacatcgaggacggcagcgtgcagctcgccgaccactaccagcagaacacccccatcggcgacggccccgtgctgctgcccgacaaccactacctgagcacccagtccgccctgagcaaagaccccaacgagaagcgcgatcacatggtcctgctggagttcgtgaccgccgccgggatcactctcggcatggacgagctgtacaagtactcagatctcgagctcgctaggaatgcattagaggtccacacgaaccaggacccgctcgattaattaatcaccgttgtgctcacttctcaaatcgacaaaggaaacacacttcgtgcagcatgtgccccattataaagaaactgagttgttccgttgtggcttgcaggtgtcacatccacagaaaccggccgactctaaataggagtgtttcgcagcaagcagcgaaagtttatgactgggtccgaatctctgaacggatgtgtggcggacctggctgatgttgatcgccgtcgacacacgcgccacatgggtcaatacacaagacagctatcagttgttctagtcgaaccggttaacacaattcttgcccccccgagggataacttcgtataatgtatgctatacgaagttatggatccactagtttacgtatcgcgactagcagcaagttgagtgacagcgtgcgtcgtgcgacagggcaagtgtaccaaaagtcacatcggaggtgtaccggtgaacgaaggaggttagaaacagaagtgacacgagctagactcgaccagagagtcttttttcaccgagcaaggggacgcaatgctgctgactcgatgaacgctcttcagtcccggctggcgacgtcgagcaactggccggtcattgcgacgcgagaatgcgacgcgagaatgcgacgcgacacaccagagacccgtggtctcctatttaggtgggttccggtgacacgtctgtcgagtttttagcagcatgttgcatcacccccgtcgctcgagccattgcagagctaccaagcacgagtggttacctagcaattgaagatcgaatcacgcctgtgttgcggcgtgattgcacgactcccctaaaagcgacactgcagctcatcgagctccgtgccaatggcggggacgagggtgtgatacttgttgaccaggcgggacagcggccgctaacagtgcacagtgaggtctgatgaacacactggaaactctgtgacctttcgcgcagcaccgtcaacgacagttgtctcccgatttctgcggaggggacgcttccctgcgggcgtcgtccgtgtcgaccggcttgttttttcccgtaggagtctatggcaaaacttgacggtaggacacgattttggtgagcaaaaaatgaggccgaaggcggaaaaactcaggacgaggaaagtaggcacagtgaggccttccacaagggcactgctgccgcttttaaaaaggcgagttcaactagcttacagggaaatgattctctgccgagagcctgaatcgcaacataacgactctgaacctgatgcatttccaaaagtcgcgtgacacgcaacttcttggcacacggtgcacaccagaatcgccaccaaagagacggagcggggcttgccgccgacagaagcgacgcacacgccactcttctgcttcacatctctgtgcctctggagttgtgtgtgtcacaagcgagtgaagaagttcgcattcgttgtccagcaaaacgggacgaagccttcacttcgtgagtggagagtcgagcggccttccatgtgacctttctgttcgcccccccccccccccccactttcctccgtgtgccgccgtacctgtcatcctaggcgtggagagagagtgtgtataatgcagaagttatcggcggcattttacgttatcgtctctcatctcaaaaacgtctacactgacatctacttcctcctacgcgctgctgcgggtgtcacctaagggacatttacacgcggtgtggagtcataccaggggtgtgaaatgcagggaaaagtacggaagaagagaagactagacttctcggtcctgcgccctcactcgggggggtctgccaaactccctccgccttcgactcctactgagccgcgcttctcaaggatttaccttccagctgtttcggagacaaaagatttgtttcctccgagaaccacatcgactagacaacaaccgatgtgaccatgggtgtcagcagatgccgtacacacggggggtaagtcgtatgcatacctcgcaagtccacacattggtgtgcttgcatccatttttgaaagcatacgcatgcacttgtatgcaccagcatgacgaccgctgtggacgccccgtgcttctctgaaaacttgtgtgaacttgtttgcttcgggatgcctctcccgaccccaaaacagaggaggtcggaggaacaaaggaaaagtacggtgagtgagcgacgatgcagggtccagaaactaggtaagtccagcgaaacgaatagaagctgaacagaaatggcaacgggaacgggcaaatttgactgggaaactcaaggcgaagacagtggacatctcgtcatgcaggtccttcacttttcttcaactgtttctcggcgagttccttctgctgagcgcgattgcagctccagagcttgactgtgcagtcgagggatcctgtacagtcgacaacaaaatacagaagcagcggaaacaacgaatgtgcgaaagagaaacatgtggaaagaaaatgtcctcgaaaaaggaggaacaacccacgcgccgtagataaaagagagactcatctatgcgcggtcactaccttacttgccaatgcagacatacggtttcttggatccgtcggcaaacctactgtgcacggacttaggtgcatgggtaaacacatgaaaagagaaaggcttatttcgaacccccagctctgcagccctgtcgcttatcggtttgccttcttcatgtgatagctgccttccacctcacatgcgggtgcttctctcatccactccgattctatcaaatttccctgtcgtcacctcaatggcctcacacatacatacagtgaaaccgaacatattcagaggcactgggaggcataatgcgatgtgccaatcttcacatgaagcaaaaagaattgttcttcccaagaggaattccacgtggatatctctagttctagagcggccgccaccgcggtggagctccagcttttgttccctttagtgagggttaattgcgcgcttggcgtaatcatggtcatagctgtttcctgtgtgaaattgttatccgctcacaattccacacaacatacgagccggaagcataaagtgtaaagcctggggtgcctaatgagtgagctaactcacattaattgcgttgcgctcactgcccgctttccagtcgggaaacctgtcgtgccagctgcattaatgaatcggccaacgcgcggggagaggcggtttgcgtattgggcgctcttccgcttcctcgctcactgactcgctgcgctcggtcgttcggctgcggcgagcggtatcagctcactcaaaggcggtaatacggttatccacagaatcaggggataacgcaggaaagaacatgtgagcaaaaggccagcaaaaggccaggaaccgtaaaaaggccgcgttgctggcgtttttccataggctccgcccccctgacgagcatcacaaaaatcgacgctcaagtcagaggtggcgaaacccgacaggactataaagataccaggcgtttccccctggaagctccctcgtgcgctctcctgttccgaccctgccgcttaccggatacctgtccgcctttctcccttcgggaagcgtggcgctttctcatagctcacgctgtaggtatctcagttcggtgtaggtcgttcgctccaagctgggctgtgtgcacgaaccccccgttcagcccgaccgctgcgccttatccggtaactatcgtcttgagtccaacccggtaagacacgacttatcgccactggcagcagccactggtaacaggattagcagagcgaggtatgtaggcggtgctacagagttcttgaagtggtggcctaactacggctacactagaaggacagtatttggtatctgcgctctgctgaagccagttaccttcggaaaaagagttggtagctcttgatccggcaaacaaaccaccgctggtagcggtggtttttttgtttgcaagcagcagattacgcgcagaaaaaaaggatctcaagaagatcctttgatcttttctacggggtctgacgctcagtggaacgaaaactcacgttaagggattttggtcatgagattatcaaaaaggatcttcacctagatccttttaaattaaaaatgaagttttaaatcaatctaaagtatatatgagtaaacttggtctgacagttaccaatgcttaatcagtgaggcacctatctcagcgatctgtctatttcgttcatccatagttgcctgactccccgtcgtgtagataactacgatacgggagggcttaccatctggccccagtgctgcaatgataccgcgagacccacgctcaccggctccagatttatcagcaataaaccagccagccggaagggccgagcgcagaagtggtcctgcaactttatccgcctccatccagtctattaattgttgccgggaagctagagtaagtagttcgccagttaatagtttgcgcaacgttgttgccattgctacaggcatcgtggtgtcacgctcgtcgtttggtatggcttcattcagctccggttcccaacgatcaaggcgagttacatgatcccccatgttgtgcaaaaaagcggttagctccttcggtcctccgatcgttgtcagaagtaagttggccgcagtgttatcactcatggttatggcagcactgcataattctcttactgtcatgccatccgtaagatgcttttctgtgactggtgagtactcaaccaagtcattctgagaatagtgtatgcggcgaccgagttgctcttgcccggcgtcaatacgggataataccgcgccacatagcagaactttaaaagtgctcatcattggaaaacgttcttcggggcgaaaactctcaaggatcttaccgctgttgagatccagttcgatgtaacccactcgtgcacccaactgatcttcagcatcttttactttcaccagcgtttctgggtgagcaaaaacaggaaggcaaaatgccgcaaaaaagggaataagggcgacacggaaatgttgaatactcatactcttcctttttcaatattattgaagcatttatcagggttattgtctcatgagcggatacatatttgaatgtatttagaaaaataaacaaataggggttccgcgcacatttccccgaaaagtgccac

SEQ ID NO: 35 - DNA, 86 bp, artificial sequence; identical to SEQ ID NO: 13
  primer

SEQ ID NO: 36 - DNA, 85 bp, artificial sequence
  primer
cgacgcacgctgtcactcaacttgctgctagaactagtggatccataacttcgtatagcatacattatacgaagttatccctcgg

SEQ ID NO: 37 - DNA, 4127 bp, artificial sequence
  plasmid
ctgacgcgccctgtagcggcgcattaagcgcggcgggtgtggtggttacgcgcagcgtgaccgctacacttgccagcgccctagcgcccgctcctttcgctttcttcccttcctttctcgccacgttcgccggctttccccgtcaagctctaaatcgggggctccctttagggttccgatttagtgctttacggcacctcgaccccaaaaaacttgattagggtgatggttcacgtagtgggccatcgccctgatagacggtttttcgccctttgacgttggagtccacgttctttaatagtggactcttgttccaaactggaacaacactcaaccctatctcggtctattcttttgatttataagggattttgccgatttcggcctattggttaaaaaatgagctgatttaacaaaaatttaacgcgaattttaacaaaatattaacgcttacaatttccattcgccattcaggctgcgcaactgttgggaagggcgatcggtgcgggcctcttcgctattacgccagctggcgaaagggggatgtgctgcaaggcgattaagttgggtaacgccagggttttcccagtcacgacgttgtaaaacgacggccagtgagcgcgcgtaatacgactcactatagggcgaattgggtaccgggccccccctcgaggtcgacggtatcgataagcttgatatgcatgtccgcgttcgtgaaattctctgatcaagcggagtgatcaccaatcatcgtctcagcgggatgacgttgcggcaagggccggctcgcggtgggcagtcagatgccgaacgtaactcaggacggcttgcgctcatcgcagaacaggggtggtgcctgcattgggtgcggttggtgatcctggttggaccggtggagatgcgcgcgcacgaaggggatgtgtcagaaacattttgtttgttctctgtgaacttttagatgtgttaaaggcggcgaatattagcagagagtcctccttgttccattctctcttgaatttcgccctttccttctctttgcgagtgtggtagagaacaagcactcgttcgccgtccctgacgacgcaacccgcgcagaagacatccaccaaacggtgttacacaatcaccttgtgtgaagttcttgcggaaaactactcgttggcattttttcttgaattccctttttcgacaaaatgcataagttgaccagtgccgttccggtgctcaccgcgcgcgacgtcgccggagcggtcgagttctggaccgaccggctcgggttctcccgggacttcgtggaggacgacttcgccggtgtggtccgggacgacgtgaccctgttcatcagcgcggtccaggaccaggtggtgccggacaacaccctggcctgggtgtgggtgcgcggcctggacgagctgtacgccgagtggtcggaggtcgtgtccacgaacttccgggacgcctccgggccggccatgaccgagatcggcgagcagccgtgggggcgggagttcgccctgcgcgacccggccggcaactgcgtgcacttcgtggccgaggagcaggattaattaatcaccgttgtgctcacttctcaaatcgacaaaggaaacacacttcgtgcagcatgtgccccattataaagaaactgagttgttccgttgtggcttgcaggtgtcacatccacagaaaccggccgactctaaataggagtgtttcgcagcaagcagcgaaagtttatgactgggtccgaatctctgaacggatgtgtggcggacctggctgatgttgatcgccgtcgacacacgcgccacatgggtcaatacacaagacagctatcagttgttctagtcgaaccggttaacacaattcttgcccccccgagggggatccactagttctagagcggccgccaccgcggtggagctccagcttttgttccctttagtgagggttaattgcgcgcttggcgtaatcatggtcatagctgtttcctgtgtgaaattgttatccgctcacaattccacacaacatacgagccggaagcataaagtgtaaagcctggggtgcctaatgagtgagctaactcacattaattgcgttgcgctcactgcccgctttccagtcgggaaacctgtcgtgccagctgcattaatgaatcggccaacgcgcggggagaggcggtttgcgtattgggcgctcttccgcttcctcgctcactgactcgctgcgctcggtcgttcggctgcggcgagcggtatcagctcactcaaaggcggtaatacggttatccacagaatcaggggataacgcaggaaagaacatgtgagcaaaaggccagcaaaaggccaggaaccgtaaaaaggccgcgttgctggcgtttttccataggctccgcccccctgacgagcatcacaaaaatcgacgctcaagtcagaggtggcgaaacccgacaggactataaagataccaggcgtttccccctggaagctccctcgtgcgctctcctgttccgaccctgccgcttaccggatacctgtccgcctttctcccttcgggaagcgtggcgctttctcatagctcacgctgtaggtatctcagttcggtgtaggtcgttcgctccaagctgggctgtgtgcacgaaccccccgttcagcccgaccgctgcgccttatccggtaactatcgtcttgagtccaacccggtaagacacgacttatcgccactggcagcagccactggtaacaggattagcagagcgaggtatgtaggcggtgctacagagttcttgaagtggtggcctaactacggctacactagaaggacagtatttggtatctgcgctctgctgaagccagttaccttcggaaaaagagttggtagctcttgatccggcaaacaaaccaccgctggtagcggtggtttttttgtttgcaagcagcagattacgcgcagaaaaaaaggatctcaagaagatcctttgatcttttctacggggtctgacgctcagtggaacgaaaactcacgttaagggattttggtcatgagattatcaaaaaggatcttcacctagatccttttaaattaaaaatgaagttttaaatcaatctaaagtatatatgagtaaacttggtctgacagttaccaatgcttaatcagtgaggcacctatctcagcgatctgtctatttcgttcatccatagttgcctgactccccgtcgtgtagataactacgatacgggagggcttaccatctggccccagtgctgcaatgataccgcgagacccacgctcaccggctccagatttatcagcaataaaccagccagccggaagggccgagcgcagaagtggtcctgcaactttatccgcctccatccagtctattaattgttgccgggaagctagagtaagtagttcgccagttaatagtttgcgcaacgttgttgccattgctacaggcatcgtggtgtcacgctcgtcgtttggtatggcttcattcagctccggttcccaacgatcaaggcgagttacatgatcccccatgttgtgcaaaaaagcggttagctccttcggtcctccgatcgttgtcagaagtaagttggccgcagtgttatcactcatggttatggcagcactgcataattctcttactgtcatgccatccgtaagatgcttttctgtgactggtgagtactcaaccaagtcattctgagaatagtgtatgcggcgaccgagttgctcttgcccggcgtcaatacgggataataccgcgccacatagcagaactttaaaagtgctcatcattggaaaacgttcttcggggcgaaaactctcaaggatcttaccgctgttgagatccagttcgatgtaacccactcgtgcacccaactgatcttcagcatcttttactttcaccagcgtttctgggtgagcaaaaacaggaaggcaaaatgccgcaaaaaagggaataagggcgacacggaaatgttgaatactcatactcttcctttttcaatattattgaagcatttatcagggttattgtctcatgagcggatacatatttgaatgtatttagaaaaataaacaaataggggttccgcgcacatttccccgaaaagtgccac

SEQ ID NO: 38 - DNA, 5270 bp, artificial sequence
  plasmid
agcttataacttcgtataatgtatgctatacgaagttatgatatgcatgtccgcgttcgtgaaatctctgatcaagcggagtgatcaggaatcatcgtctcagcgggatgacgttgcggagcaggccggctcgcggtgggcagtcagatgccgaaggcgtaactcaggacggcttgcgctcatcgcagaacaggggtggtgcctgcattgggtgcggttggtgatcctggttggaccggtggagatgcgcgcgcacgaaggggatgtgtcagaaacattttgtttgttctctgtgaacttttagatgtgttaaaggcggcgaatattagcagagagtcctccttgttggattctctcttgaatttcgccctttccttctctttgcgagtctcgtagagaacaagcactcgttcgccgtccctgacgacgcaacccgcgcagaagacatccaccaaacggtgttacacaatcaccttgtgtgaagttcttgcggaaaactactcgttggcattttttcttgaattccctttttcgacaaaatgcatgagaaaaaaatcactggatataccaccgttgatatatcccaatcgcatcgtaaagaacattttgaggcatttcagtcagttgctcaatgtacctataaccagaccgttcagctggatattacggcctttttaaagaccgtaaagaaaaataagcacaagttttatccggcctttattcacattcttgcccgcctgatgaatgctcatccggaattccgtatggcaatgaaagacggtgagctggtgatatgggatagtgttcacccttgttacaccgttttccatgagcaaactgaaacgttttcatcgctctggagtgaataccacgacgatttccggcagtttctacacatatattcgcaagatgtggcgtgttacggtgaaaacctggcctatttccctaaagggtttattgagaatatgtttttcgtctcagccaatccctgggtgagtttcaccagttttgatttaaacgtggccaatatggacaacttcttcgcccccgttttcaccatgggcaaatattatacgcaaggcgacaaggtgctgatgccgctggcgattcaggttcatcatgccgtctgtgatggcttccatgtcggcagaatgcttaatgaattacaacagtactgcgatgagtggcagggcggggctcctaggatggtgagcaagggcgaggagctgttcaccggggtggtgcccatcctggtcgagctggacggcgacgtaaacggccacaagttcagcgtgtccggcgagggcgagggcgatgccacctacggcaagctgaccctgaagttcatctgcaccaccggcaagctgcccgtgccctggcccaccctcgtgaccaccctgacctacggcgtgcagtgcttcagccgctaccccgaccacatgaagcagcacgacttcttcaagtccgccatgcccgaaggctacgtccaggagcgcaccatcttcttcaaggacgacggcaactacaagacccgcgccgaggtgaagttcgagggcgacaccctggtgaaccgcatcgagctgaagggcatcgacttcaaggaggacggcaacatcctggggcacaagctggagtacaactacaacagccacaacgtctatatcatggccgacaagcagaagaacggcatcaaggtgaacttcaagatccgccacaacatcgaggacggcagcgtgcagctcgccgaccactaccagcagaacacccccatcggcgacggccccgtgctgctgcccgacaaccactacctgagcacccagtccgccctgagcaaagaccccaacgagaagcgcgatcacatggtcctgctggagttcgtgaccgccgccgggatcactctcggcatggacgagctgtacaagtactcagatctcgagctcgctaggaatgcattagaggtccacacgaaccaggacccgctcgattaattaatcaccgttgtgctcacttctcaaatcgacaaaggaaacacacttcgtgcagcatgtgccccattataaagaaactgagttgttccgttgtggcttgcaggtgtcacatccacagaaaccggccgactctaaataggagtgtttcgcagcaagcagcgaaagtttatgactgggtccgaatctctgaacggatgtgtggcggacctggctgatgttgatcgccgtcgacacacgcgccacatgggtcaatacacaagacagctatcagttgttctagtcgaaccggttaacacaattcttgcccccccgagggataacttcgtataatgtatgctatacgaagttatggatccactagttctagagcggccgccaccgcggtggagctccagcttttgttccctttagtgagggttaattgcgcgcttggcgtaatcatggtcatagctgtttcctgtgtgaaattgttatccgctcacaattccacacaacatacgagccggaagcataaagtgtaaagcctggggtgcctaatgagtgagctaactcacattaattgcgttgcgctcactgcccgctttccagtcgggaaacctgtcgtgccagctgcattaatgaatcggccaacgcgcggggagaggcggtttgcgtattgggcgctcttccgcttcctcgctcactgactcgctgcgctcggtcgttcggctgcggcgagcggtatcagctcactcaaaggcggtaatacggttatccacagaatcaggggataacgcaggaaagaacatgtgagcaaaaggccagcaaaaggccaggaaccgtaaaaaggccgcgttgctggcgtttttccataggctccgcccccctgacgagcatcacaaaaatcgacgctcaagtcagaggtggcgaaacccgacaggactataaagataccaggcgtttccccctggaagctccctcgtgcgctctcctgttccgaccctgccgcttaccggatacctgtccgcctttctcccttcgggaagcgtggcgctttctcatagctcacgctgtaggtatctcagttcggtgtaggtcgttcgctccaagctgggctgtgtgcacgaaccccccgttcagcccgaccgctgcgccttatccggtaactatcgtcttgagtccaacccggtaagacacgacttatcgccactggcagcagccactggtaacaggattagcagagcgaggtatgtaggcggtgctacagagttcttgaagtggtggcctaactacggctacactagaaggacagtatttggtatctgcgctctgctgaagccagttaccttcggaaaaagagttggtagctcttgatccggcaaacaaaccaccgctggtagcggtggtttttttgtttgcaagcagcagattacgcgcagaaaaaaaggatctcaagaagatcctttgatcttttctacggggtctgacgctcagtggaacgaaaactcacgttaagggattttggtcatgagattatcaaaaaggatcttcacctagatccttttaaattaaaaatgaagttttaaatcaatctaaagtatatatgagtaaacttggtctgacagttaccaatgcttaatcagtgaggcacctatctcagcgatctgtctatttcgttcatccatagttgcctgactccccgtcgtgtagataactacgatacgggagggcttaccatctggccccagtgctgcaatgataccgcgagacccacgctcaccggctccagatttatcagcaataaaccagccagccggaagggccgagcgcagaagtggtcctgcaactttatccgcctccatccagtctattaattgttgccgggaagctagagtaagtagttcgccagttaatagtttgcgcaacgttgttgccattgctacaggcatcgtggtgtcacgctcgtcgtttggtatggcttcattcagctccggttcccaacgatcaaggcgagttacatgatcccccatgttgtgcaaaaaagcggttagctccttcggtcctccgatcgttgtcagaagtaagttggccgcagtgttatcactcatggttatggcagcactgcataattctcttactgtcatgccatccgtaagatgcttttctgtgactggtgagtactcaaccaagtcattctgagaatagtgtatgcggcgaccgagttgctcttgcccggcgtcaatacgggataataccgcgccacatagcagaactttaaaagtgctcatcattggaaaacgttcttcggggcgaaaactctcaaggatcttaccgctgttgagatccagttcgatgtaacccactcgtgcacccaactgatcttcagcatcttttactttcaccagcgtttctgggtgagcaaaaacaggaaggcaaaatgccgcaaaaaagggaataagggcgacacggaaatgttgaatactcatactcttcctttttcaatattattgaagcatttatcagggttattgtctcatgagcggatacatatttgaatgtatttagaaaaataaacaaataggggttccgcgcacatttccccgaaaagtgccacctgacgcgccctgtagcggcgcattaagcgcggcgggtgtggtggttacgcgcagcgtgaccgctacacttgccagcgccctagcgcccgctcctttcgctttcttcccttcctttctcgccacgttcgccggctttccccgtcaagctctaaatcgggggctccctttagggttccgatttagtgctttacggcacctcgaccccaaaaaacttgattagggtgatggttcacgtagtgggccatcgccctgatagacggtttttcgccctttgacgttggagtccacgttctttaatagtggactcttgttccaaactggaacaacactcaaccctatctcggtctattcttttgatttataagggattttgccgatttcggcctattggttaaaaaatgagctgatttaacaaaaatttaacgcgaattttaacaaaatattaacgcttacaatttccattcgccattcaggctgcgcaactgttgggaagggcgatcggtgcgggcctcttcgctattacgccagctggcgaaagggggatgtgctgcaaggcgattaagttgggtaacgccagggttttcccagtcacgacgttgtaaaacgacggccagtgagcgcgcgtaatacgactcactatagggcgaattgggtaccgggccccccctcgaggtcgacggtatcgata

SEQ ID NO: 39 - DNA, 2121 bp, Toxoplasma gondii
  misc_feature (147)..(147): n is a, c, g, or t
agtgcatgcaacgcggagaaaatcggcgactagatgcacaccatgtgggccagagatgtagaagcccgggaagaggaacgagtaccagatatttcacgcaaaaaaatctcagattcttgtttgaagccgcgtgtgaatttcggtgcntgcgcatggacctggaagtaactctgaaaggcgcgatttcgtgggcagcaaagaagtccgggccgtgaagcactgtctcgacgcaatgctttgacaaactgagaatgcatcttttaacggatatgtgactgcccgatagtagcctgtagttggtggtcgcacactgttttctgggccaagagttaaatgctagacaacacacacagaacaagcgacgcagcgcgttggaagaaactagccgagatgacggttccgtttgctgtggagaacgttgttttacgtggaggcttcgtggctctcaagaaatcaactcactaagcaatttctatcggcactcttcttccggggagtaatggagagtggacagcaaaccagcactctgcgagggacgtagaaatgcgtagatcgatttcagtgcacaacattgctttttcgaacgcaaaaaaacacgtatttggacgcccaaaagctacgcattcacgctgggaaaaacatggagtgcattcggatgtacatagaacgcctccaaatgtgcgcggcatgtcgagaattggccgcgaggcctcacgtttgttattgtgtctcaaaaaatcccgtgaaatgtgagaggttctaggctcctcgagattccccgaaaacactgaacacgtcgggaaacggagagttgagatgcacggaagcaaagaagctatgggaaaaggaggggatgggaggagcgggcgcaatgcagcaaataagacggagagaatggaaagagcgttggagaagagaggcaagacagaaaaacggagccaggccaccgcggaaatggggcacacggcttccttctatgatgtctacacaaatacagctggtcgaatattgagcacaacgctcacaagccgtgtcaaggacccagtgaagctcgtagacaaagaaacgacgaaaagccaacaaggaagcacagtgccgaccagacttcctgccgtaggtttcagtcagatatgtgtggagtgtacaactaccctagacaaaggaagtcttgtttcagcagctttgtatgcgactgtagaaagggtagaggaataggaagaatccgatagcactgacggagacagaatgacataagaaggtatactcgactgtcacgaaaacacttgtcgaaaaattggtggaagagcactcacagaagagcaccattacgtccattcccgcatttctctcagaaattgccccggggagacgagactgtttgcgagtgcacctcagtcaaacgcagcaagtgtcggcgttggctgcttctcaagtagctgctgactcgaacgtacattttcggatcgcttgcctacagcgaaacggcgatcattgtattggagtaaacgcagcaacagatcccttgttctacaacgagcaaaatgtgtaaaggcaggcgatttccccagaggttgacaccgacaaagcaggttctcatagaatgaagaggccgcacctcctagtggcagaagcgttcttttcgtaggcacttcggcagagatgtctcacgtttgatgggttcttatttcatacatggttgggcggtttaggctttcagactcgagaaccatcagaattcaaactttgcacgcggcaaaacgcgggggtaaccatgtcgtgtgtcggtggtaattagtgaggcagtcttgctttagttggcagtgtgtcctcatgttttccctcgctgtctgcgtaaaggcacacaatctactttgttttacctgaactcggttcacaaacctaacgttctcggtacaaacccatctgtgtatccgcgtgtgagccgatcgcttcgttgcagaacttctttctaggccaaggccactattgccagcggcacaaatcgaaatattctcaatccttggcttagtgtggagactttttacttcgtgttactattgtttctcgagtcaaactctgcatcttgtctttgcgctgatctccgctctcagagactcgctg

SEQ ID NO: 40 - DNA, 9079 bp, artificial sequence
  plasmid
  misc_feature (828)..(828): n is a, c, g, or t
  misc_feature (3514)..(3514): n is a, c, g, or t
  misc_feature (6833)..(6834): n is a, c, g, or t
  misc_feature (6838)..(6843): n is a, c, g, or t
ctgacgcgccctgtagcggcgcattaagcgcggcgggtgtggtggttacgcgcagcgtgaccgctacacttgccagcgccctagcgcccgctcctttcgctttcttcccttcctttctcgccacgttcgccggctttccccgtcaagctctaaatcgggggctccctttagggttccgatttagtgctttacggcacctcgaccccaaaaaacttgattagggtgatggttcacgtagtgggccatcgccctgatagacggtttttcgccctttgacgttggagtccacgttctttaatagtggactcttgttccaaactggaacaacactcaaccctatctcggtctattcttttgatttataagggattttgccgatttcggcctattggttaaaaaaatgagctgatttaacaaaaatttaacgcgaattttaacaaaatattaacgcttacaatttccattcgccattcaggctgcgcaactgttgggaagggcgatcggtgcgggcctcttcgctattacgccagctggcgaaagggggatgtgctgcaaggcgattaagttgggtaacgccagggttttcccagtcacgacgttgtaaaacggcggccagtgagcgcgggtaatacggctcagtgtagggcgaattgggtaccgaggtcatgagcggaagtgggcagtgcatgcaacgcggagaaaatcggcgactagatgcacaccatgtgggccagagatgtagaagcccgggaagaggaacgagtaccagatatttcacgcaaaaaaatctcagattcttgtttgaagccgcgtgtgaatttcggtgcntgcgcatggacctggaagtaactctgaaaggcgcgatttcgtgggcagcaaagaagtccgggccgtgaagcactgtctcgacgcaatgctttgacaaactgagaatgcatcttttaacggatatgtgactgcccgatagtagcctgtagttggtggtcgcacactgttttctgggccaagagttaaatgctagacaacacacacagaacaagcgacgcagcgcgttggaagaaactagccgagatgacggttccgtttgctgtggagaacgttgttttacgtggaggcttcgtggctctcaagaaatcaactcactaagcaatttctatcggcactcttcttccggggagtaatggagagtggacagcaaaccagcactctgcgagggacgtagaaatgcgtagatcgatttcagtgcacaacattgctttttcgaacgcaaaaaaacacgtatttggacgcccaaaagctacgcattcacgctgggaaaaacatggagtgcattcggatgtacatagaacgcctccaaatgtgcgcggcatgtcgagaattggccgcgaggcctcacgtttgttattgtgtctcaaaaaatcccgtgaaatgtgagaggttctaggctcctcgagattccccgaaaacactgaacacgtcgggaaacggagagttgagatgcacggaagcaaagaagctatgggaaaaggaggggatgggaggagcgggcgcaatgcagcaaataagacggagagaatggaaagagcgttggagaagagaggcaagacagaaaaacggagccaggccaccgcggaaatggggcacacggcttccttctatgatgtctacacaaatacagctggtcgaatattgagcacaacgctcacaagccgtgtcaaggacccagtgaagctcgtagacaaagaaacgacgaaaagccaacaaggaagcacagtgccgaccagacttcctgccgtaggtttcagtcagatatgtgtggagtgtacaactaccctagacaaaggaagtcttgtttcagcagctttgtatgcgactgtagaaagggtagaggaataggaagaatccgatagcactgacggagacagaatgacataagaaggtatactcgactgtcacgaaaacacttgtcgaaaaattggtggaagagcactcacagaagagcaccattacgtccattcccgcatttctctcagaaattgccccggggagacgagactgtttgcgagtgcacctcagtcaaacgcagcaagtgtcggcgttggctgcttctcaagtagctgctgactcgaacgtacattttcggatcgcttgcctacagcgaaacggcgatcattgtattggagtaaacgcagcaacagatcccttgttctacaacgagcaaaatgtgtaaaggcaggcgatttccccagaggttgacaccgacaaagcaggttctcatagaatgaagaggccgcacctcctagtggcagaagcgttcttttcgtaggcacttcggcagagatgtctcacgtttgatgggttcttatttcatacatggttgggcggtttaggctttcagactcgagaaccatcagaattcaaactttgcacgcggcaaaacgcgggggtaaccatgtcgtgtgtcggtggtaattagtgaggcagtcttgctttagttggcagtgtgtcctcatgttttccctcgctgtctgcgtaaaggcacacaatctactttgttttacctgaactcggttcacaaacctaacgttctcggtacaaacccatctgtgtatccgcgtgtgagccgatcgcttcgttgcagaacttctttctaggccaaggccactattgccagcggcacaaatcgaaatattctcaatccttggcttagtgtggagactttttacttcgtgttactattgtttctcgagtcaaactctgcatcttgtctttgcgctgatctccgctctcagagactcgctgaagcttgatggcgatgcatgtcccgcgttcgtgaaattctctgcatcagcggagtgatcaggaatcatcgtctcagcgggatgacgttgcggagcaggccggctcgcggtgggcagtcagatgccgaaggcgtaactcaggacggcttgcgctcatcgcagaacaggggtggtgcctgcattgggtgcggttggtgatcctggttggaccggtggagatgcgcgcgcacgaaggggatgtgtcagaaacattttgtttgttctctgtgaacttttagatgtgttaaaggcggcgaatattagcagagagtcctccttgttggattctctcttgaatttcgccctttccttctctttgcgagtctcgtagagaacaagcactcgttcgccgtccctgacgacgcaacccgcgcagaagacatccaccaaacggtgttacacaatcaccttgtgtgaagttcttgcggaaaactactcgttggcattttttcttgaattccctttttcgacaaaatgcatgagaaaaaaatcactggatataccaccgttgatatatcccaatcgcatcgtaaagaacattttgaggcatttcagtcagttgctcaatgtacctataaccagaccgttcagctggatattacggcctttttaaagaccgtaaagaaaaataagcacaagttttatccggcctttattcacattcttgcccgccngatgaatgctcatccggaattccgtatggcaatgaaagacggtgagctggtgatatgggatagtgttcacccttgttacaccgttttccatgagcaaactgaaacgttttcatcgctctggagtgaataccacgacgatttccggcagtttctacacatatattcgcaagatgtggcgtgttacggtgaaaacctggcctatttccctaaagggtttattgagaatatgtttttcgtctcagccaatccctgggtgagtttcaccagttttgatttaaacgtggccaatatggacaacttcttcgcccccgttttcaccatgggcaaatattatacgcaaggcgacaaggtgctgatgccgctggcgattcaggttcatcatgccgtttgtgatggcttccatgtcggcagaatgcttaatgaattacaacagtactgcgatgagtggcagggcggggcttaattaatcaccgttgtgctcacttctcaaatcgacaaaggaaacacacttcgtgcagcatgtgccccattataaagaaactgagttgttccgttgtggcttgcaggtgtcacatccacaaaaaccggccgactctaaataggagtgtttcgcagcaagcagcgaaagtttatgactgggtccgaatctctgaacggatgtgtggcggacctggctgatgttgatcgccgtcgacacacgcgccacatgggtcaatacacaagacagctatcagttgttttagtcgaaccggttaacacaattcttgcccccccgagggggatccactagttctagcagcaagttgagtgacagcgtgcgtcgtgcgacagggcaagtgtaccaaaagtcacatcggaggtgtaccggtgaacgaaggaggttagaaacagaagtgacacgagctagactcgaccagagagtcttttttcaccgagcaaggggacgcaatgctgctgactcgatgaacgctcttcagtcccggctggcgacgtcgagcaactggccggtcattgcgacgcgagaatgcgacgcgagaatgcgacgcgacacaccagagacccgtggtctcctatttaggtgggttccggtgacacgtctgtcgagtttttagcagcatgttgcatcacccccgtcgctcgagccattgcagagctaccaagcacgagtggttacctagcaattgaagatcgaatcacgcctgtgttgcggcgtgattgcacgactcccctaaaagcgacactgcagctcatcgagctccgtgccaatggcggggacgagggtgtgatacttgttgaccaggcgggacagcggccgctaacagtgcacagtgaggtctgatgaacacactggaaactctgtgacctttcgcgcagcaccgtcaacgacagttgtctcccgatttctgcggaggggacgcttccctgcgggcgtcgtccgtgtcgaccggcttgttttttcccgtaggagtctatggcaaaacttgacggtaggacacgattttggtgagcaaaaaatgaggccgaaggcggaaaaactcaggacgaggaaagtaggcacagtgaggccttccacaagggcactgctgccgcttttaaaaaggcgagttcaactagcttacagggaaatgattctctgccgagagcctgaatcgcaacataacgactctgaacctgatgcatttccaaaagtcgcgtgacacgcaacttcttggcacacggtgcacaccagaatcgccaccaaagagacggagcggggcttgccgccgacagaagcgacgcacacgccactcttctgcttcacatctctgtgcctctggagttgtgtgtgtcacaagcgagtgaagaagttcgcattcgttgtccagcaaaacgggacgaagccttcacttcgtgagtggagagtcgagcggccttccatgtgacctttctgttcgcccccccccccccccccactttcctccgtgtgccgccgtacctgtcatcctaggcgtggagagagagtgtgtataatgcagaagttatcggcggcattttacgttatcgtctctcatctcaaaaacgtctacactgacatctacttcctcctacgcgctgctgcgggtgtcacctaagggacatttacacgcggtgtggagtcataccaggggtgtgaaatgcagggaaaagtacggaagaagagaagactagacttctcggtcctgcgccctcactcgggggcccctgccaaactccctccgccttcgactcctactgagccgcgcttctcaaggatttaccttccagctgtttcggagacaaaagatttgtttcctccgagaaccacatcgactagacaacaaccgatgtgaccatgggtgtcagcagatgccgtacacacggggggtaagtcgtatgcatacctcgcaagtccacacattggtgtgcttgcatccatttttgaaagcatacgcatgcacttgtatgcaccagcatgacgaccgctgtggacgccccgtgcttctctgaaaacttgtgtgaacttgtttgcttcgggatgcctctcccgaccccaaaacagaggaggtcggaggaacaaaggaaaagtacggtgagtgagcgacgatgcagggtccagaaactaggtaagtccagcgaaacgaatagaagctgaacagaaatggcaacgggaacgggcaaatttgactgggaaactcaaggcgaagacagtggacatctcgtcatgcaggtccttcacttttcttcaactgtttctcggcgagttccttctgctgagcgcgattgcagctccagagcttgactgtgcagtcgagggatcctgtacagtcgacaacaaaatacagaagcagcggaaacaacgaatgtgcgaaagagaaacatgtggaaagaaaatgtcctcgaaaaaggaggaacaacccacgcgccgtagataaaagagagactcatctatgcgcggtcactaccttacttgccaatgcagacatacggtttcttggatccgtcggcaaacctactgtgcacggacttaggtgcatgggtaaacacatgaaaagagaaaggcttatttcgaacccccagctctgcagccctgtcgcttatcggtttgccttcttcatgtgatagctgccttccacctcacatgcgggtgcttctctcatccactccgattctatcaaatttccctgtcgtcacctcaatggcctcacacatacatacagtgaaaccgaacatattcagaggcactgggaggcataatgcgatgtgccaatcttcacatgaagcaaaaagaattgttcttcccaagaggaattcctgcagcccnngggnnnnnnctagttctagagcggccgccaccgcgggggagctccagcttttgttccctttagtgagggttaattgcgcgcttggcgtaatcatggtcatagctgtttcctgtgtgaaattgttatccgctcacaattccacacaacatacgagccggaagcataaagtgtaaagcctggggtgcctaatgagtgagctaactcacattaattgcgttgcgctcactgcccgctttccagtcgggaaacctgtcgtgccagctgcattaatgaatcggccaacgcgcggggagaggcggtttgcgtattgggcgctcttccgcttcctcgctcactgactcgctgcgctcggtcgttcggctgcggcgagcggtatcagctcactcaaaggcggtaatacggttatccacagaatcaggggataacgcaggaaagaacatgtgagcaaaaggccagcaaaaggccaggaaccgtaaaaaggccgcgttgctggcgtttttccataggctccgcccccctgacgagcatcacaaaaatcgacgctcaagtcagaggtggcgaaacccgacaggactataaagataccaggcgtttccccctggaagttccctcgtgcgctctcctgttccgaccctgccgcttaccggatacctgtccgcctttctcccttcgggaagcgtggcgctttctcatagctcacgctgtaggtatctcagttcggtgtaggtcgttcgctccaagctgggctgtgtgcacgaaccccccgttcagcccgaccgctgcgccttatccggtaactatcgtcttgagtccaacccggtaagacacgacttatcgccactggcagcagccactggtaacaggattagcagagcgaggtatgtaggcggtgctacagagttcttgaagtggtggcctaactacggctacactagaaggacagtatttggtatctgcgctctgctgaagccagttaccttcggaaaaagagttggtagctcttgatccggcaaacaaaccaccgctggtagcggtggtttttttgtttgcaagcagcagattacgcgcagaaaaaaaggatctcaagaagatcctttgatcttttctacggggtctgacgctcagtggaacgaaaactcacgttaagggattttggtcatgagattatcaaaaaggatcttcacctagatccttttaaattaaaaatgaagttttaaatcaatctaaagtatatatgagtaaacttggtctgacagttaccaatgcttaatcagtgaggcacctatctcagcgatctgtctatttcgttcatccatagttgcctgactccccgtcgtgtagataactacgatacgggagggcttaccatctggccccagtgctgcaatgataccgcgagacccacgctcaccggctccagatttatcagcaataaaccagccagccggaagggccgagcgcagaagtggtcctgcaactttatccgcctccatccagtctattaattgttgccgggaagctagagtaagtagttcgccagttaatagtttgcgcaacgttgttgccattgctacaggcatcgtggtgtcacgctcgtcgtttggtatggcttcattcagctccggttcccaacgatcaaggcgagttacatgatcccccatgttgtgcaaaaaagcggttagctccttcggtcctccgatcgttgtcagaagtaagttggccgcagtgttatcactcatggttatggcagcactgcataattctcttactgtcatgccatccgtaagatgcttttctgtgactggtgagtactcaaccaagtcattctgagaatagtgtatgcggcgaccgagttgctcttgcccggcgtcaatacgggataataccgcgccacatagcagaactttaaaagtgctcatcattggaaaacgttcttcggggcgaaaactctcaaggatcttaccgctgttgagatccagttcgatgtaacccactcgtgcacccaactgatcttcagcatcttttactttcaccagcgtttctgggtgagcaaaaacaggaaggcaaaatgccgcaaaaaagggaataagggcgacacggaaatgttgaatactcatactcttcctttttcaatattattgaagcatttatcagggttattgtctcatgagcggatacatatttgaatgtatttagaaaaataaacaaataggggttccgcgcacatttccccgaaaagtgccac

SEQ ID NO: 41 - DNA, 7383 bp, artificial sequence
  plasmid
  misc_feature (170)..(170): n is a, c, g, or t
cgaggtcatgagcggaagtgggcagtgcatgcaacgcggagaaaatcggcgactagatgcacaccatgtgggccagagatgtagaagcccgggaagaggaacgagtaccagatatttcacgcaaaaaaatctcagattcttgtttgaagccgcgtgtgaatttcggtgcntgcgcatggacctggaagtaactctgaaaggcgcgatttcgtgggcagcaaagaagtccgggccgtgaagcactgtctcgacgcaatgctttgacaaactgagaatgcatcttttaacggatatgtgactgcccgatagtagcctgtagttggtggtcgcacactgttttctgggccaagagttaaatgctagacaacacacacagaacaagcgacgcagcgcgttggaagaaactagccgagatgacggttccgtttgctgtggagaacgttgttttacgtggaggcttcgtggctctcaagaaatcaactcactaagcaatttctatcggcactcttcttccggggagtaatggagagtggacagcaaaccagcactctgcgagggacgtagaaatgcgtagatcgatttcagtgcacaacattgctttttcgaacgcaaaaaaacacgtatttggacgcccaaaagctacgcattcacgctgggaaaaacatggagtgcattcggatgtacatagaacgcctccaaatgtgcgcggcatgtcgagaattggccgcgaggcctcacgtttgttattgtgtctcaaaaaatcccgtgaaatgtgagaggttctaggctcctcgagattccccgaaaacactgaacacgtcgggaaacggagagttgagatgcacggaagcaaagaagctatgggaaaaggaggggatgggaggagcgggcgcaatgcagcaaataagacggagagaatggaaagagcgttggagaagagaggcaagacagaaaaacggagccaggccaccgcggaaatggggcacacggcttccttctatgatgtctacacaaatacagctggtcgaatattgagcacaacgctcacaagccgtgtcaaggacccagtgaagctcgtagacaaagaaacgacgaaaagccaacaaggaagcacagtgccgaccagacttcctgccgtaggtttcagtcagatatgtgtggagtgtacaactaccctagacaaaggaagtcttgtttcagcagctttgtatgcgactgtagaaagggtagaggaataggaagaatccgatagcactgacggagacagaatgacataagaaggtatactcgactgtcacgaaaacacttgtcgaaaaattggtggaagagcactcacagaagagcaccattacgtccattcccgcatttctctcagaaattgccccggggagacgagactgtttgcgagtgcacctcagtcaaacgcagcaagtgtcggcgttggctgcttctcaagtagctgctgactcgaacgtacattttcggatcgcttgcctacagcgaaacggcgatcattgtattggagtaaacgcagcaacagatcccttgttctacaacgagcaaaatgtgtaaaggcaggcgatttccccagaggttgacaccgacaaagcaggttctcatagaatgaagaggccgcacctcctagtggcagaagcgttcttttcgtaggcacttcggcagagatgtctcacgtttgatgggttcttatttcatacatggttgggcggtttaggctttcagactcgagaaccatcagaattcaaactttgcacgcggcaaaacgcgggggtaaccatgtcgtgtgtcggtggtaattagtgaggcagtcttgctttagttggcagtgtgtcctcatgttttccctcgctgtctgcgtaaaggcacacaatctactttgttttacctgaactcggttcacaaacctaacgttctcggtacaaacccatctgtgtatccgcgtgtgagccgatcgcttcgttgcagaacttctttctaggccaaggccactattgccagcggcacaaatcgaaatattctcaatccttggcttagtgtggagactttttacttcgtgttactattgtttctcgagtcaaactctgcatcttgtctttgcgctgatctccgctctcagagactcgctgaagcttataacttcgtataatgtatgctatacgaagttatgatatgcatgtccgcgttcgtgaaatctctgatcaagcggagtgatcaggaatcatcgtctcagcgggatgacgttgcggagcaggccggctcgcggtgggcagtcagatgccgaaggcgtaactcaggacggcttgcgctcatcgcagaacaggggtggtgcctgcattgggtgcggttggtgatcctggttggaccggtggagatgcgcgcgcacgaaggggatgtgtcagaaacattttgtttgttctctgtgaacttttagatgtgttaaaggcggcgaatattagcagagagtcctccttgttggattctctcttgaatttcgccctttccttctctttgcgagtctcgtagagaacaagcactcgttcgccgtccctgacgacgcaacccgcgcagaagacatccaccaaacggtgttacacaatcaccttgtgtgaagttcttgcggaaaactactcgttggcattttttcttgaattccctttttcgacaaaatgcatgagaaaaaaatcactggatataccaccgttgatatatcccaatcgcatcgtaaagaacattttgaggcatttcagtcagttgctcaatgtacctataaccagaccgttcagctggatattacggcctttttaaagaccgtaaagaaaaataagcacaagttttatccggcctttattcacattcttgcccgcctgatgaatgctcatccggaattccgtatggcaatgaaagacggtgagctggtgatatgggatagtgttcacccttgttacaccgttttccatgagcaaactgaaacgttttcatcgctctggagtgaataccacgacgatttccggcagtttctacacatatattcgcaagatgtggcgtgttacggtgaaaacctggcctatttccctaaagggtttattgagaatatgtttttcgtctcagccaatccctgggtgagtttcaccagttttgatttaaacgtggccaatatggacaacttcttcgcccccgttttcaccatgggcaaatattatacgcaaggcgacaaggtgctgatgccgctggcgattcaggttcatcatgccgtctgtgatggcttccatgtcggcagaatgcttaatgaattacaacagtactgcgatgagtggcagggcggggctcctaggatggtgagcaagggcgaggagctgttcaccggggtggtgcccatcctggtcgagctggacggcgacgtaaacggccacaagttcagcgtgtccggcgagggcgagggcgatgccacctacggcaagctgaccctgaagttcatctgcaccaccggcaagctgcccgtgccctggcccaccctcgtgaccaccctgacctacggcgtgcagtgcttcagccgctaccccgaccacatgaagcagcacgacttcttcaagtccgccatgcccgaaggctacgtccaggagcgcaccatcttcttcaaggacgacggcaactacaagacccgcgccgaggtgaagttcgagggcgacaccctggtgaaccgcatcgagctgaagggcatcgacttcaaggaggacggcaacatcctggggcacaagctggagtacaactacaacagccacaacgtctatatcatggccgacaagcagaagaacggcatcaaggtgaacttcaagatccgccacaacatcgaggacggcagcgtgcagctcgccgaccactaccagcagaacacccccatcggcgacggccccgtgctgctgcccgacaaccactacctgagcacccagtccgccctgagcaaagaccccaacgagaagcgcgatcacatggtcctgctggagttcgtgaccgccgccgggatcactctcggcatggacgagctgtacaagtactcagatctcgagctcgctaggaatgcattagaggtccacacgaaccaggacccgctcgattaattaatcaccgttgtgctcacttctcaaatcgacaaaggaaacacacttcgtgcagcatgtgccccattataaagaaactgagttgttccgttgtggcttgcaggtgtcacatccacagaaaccggccgactctaaataggagtgtttcgcagcaagcagcgaaagtttatgactgggtccgaatctctgaacggatgtgtggcggacctggctgatgttgatcgccgtcgacacacgcgccacatgggtcaatacacaagacagctatcagttgttctagtcgaaccggttaacacaattcttgcccccccgagggataacttcgtataatgtatgctatacgaagttatggatccactagttctagagcggccgccaccgcggtggagctccagcttttgttccctttagtgagggttaattgcgcgcttggcgtaatcatggtcatagctgtttcctgtgtgaaattgttatccgctcacaattccacacaacatacgagccggaagcataaagtgtaaagcctggggtgcctaatgagtgagctaactcacattaattgcgttgcgctcactgcccgctttccagtcgggaaacctgtcgtgccagctgcattaatgaatcggccaacgcgcggggagaggcggtttgcgtattgggcgctcttccgcttcctcgctcactgactcgctgcgctcggtcgttcggctgcggcgagcggtatcagctcactcaaaggcggtaatacggttatccacagaatcaggggataacgcaggaaagaacatgtgagcaaaaggccagcaaaaggccaggaaccgtaaaaaggccgcgttgctggcgtttttccataggctccgcccccctgacgagcatcacaaaaatcgacgctcaagtcagaggtggcgaaacccgacaggactataaagataccaggcgtttccccctggaagctccctcgtgcgctctcctgttccgaccctgccgcttaccggatacctgtccgcctttctcccttcgggaagcgtggcgctttctcatagctcacgctgtaggtatctcagttcggtgtaggtcgttcgctccaagctgggctgtgtgcacgaaccccccgttcagcccgaccgctgcgccttatccggtaactatcgtcttgagtccaacccggtaagacacgacttatcgccactggcagcagccactggtaacaggattagcagagcgaggtatgtaggcggtgctacagagttcttgaagtggtggcctaactacggctacactagaaggacagtatttggtatctgcgctctgctgaagccagttaccttcggaaaaagagttggtagctcttgatccggcaaacaaaccaccgctggtagcggtggtttttttgtttgcaagcagcagattacgcgcagaaaaaaaggatctcaagaagatcctttgatcttttctacggggtctgacgctcagtggaacgaaaactcacgttaagggattttggtcatgagattatcaaaaaggatcttcacctagatccttttaaattaaaaatgaagttttaaatcaatctaaagtatatatgagtaaacttggtctgacagttaccaatgcttaatcagtgaggcacctatctcagcgatctgtctatttcgttcatccatagttgcctgactccccgtcgtgtagataactacgatacgggagggcttaccatctggccccagtgctgcaatgataccgcgagacccacgctcaccggctccagatttatcagcaataaaccagccagccggaagggccgagcgcagaagtggtcctgcaactttatccgcctccatccagtctattaattgttgccgggaagctagagtaagtagttcgccagttaatagtttgcgcaacgttgttgccattgctacaggcatcgtggtgtcacgctcgtcgtttggtatggcttcattcagctccggttcccaacgatcaaggcgagttacatgatcccccatgttgtgcaaaaaagcggttagctccttcggtcctccgatcgttgtcagaagtaagttggccgcagtgttatcactcatggttatggcagcactgcataattctcttactgtcatgccatccgtaagatgcttttctgtgactggtgagtactcaaccaagtcattctgagaatagtgtatgcggcgaccgagttgctcttgcccggcgtcaatacgggataataccgcgccacatagcagaactttaaaagtgctcatcattggaaaacgttcttcggggcgaaaactctcaaggatcttaccgctgttgagatccagttcgatgtaacccactcgtgcacccaactgatcttcagcatcttttactttcaccagcgtttctgggtgagcaaaaacaggaaggcaaaatgccgcaaaaaagggaataagggcgacacggaaatgttgaatactcatactcttcctttttcaatattattgaagcatttatcagggttattgtctcatgagcggatacatatttgaatgtatttagaaaaataaacaaataggggttccgcgcacatttccccgaaaagtgccacctgacgcgccctgtagcggcgcattaagcgcggcgggtgtggtggttacgcgcagcgtgaccgctacacttgccagcgccctagcgcccgctcctttcgctttcttcccttcctttctcgccacgttcgccggctttccccgtcaagctctaaatcgggggctccctttagggttccgatttagtgctttacggcacctcgaccccaaaaaacttgattagggtgatggttcacgtagtgggccatcgccctgatagacggtttttcgccctttgacgttggagtccacgttctttaatagtggactcttgttccaaactggaacaacactcaaccctatctcggtctattcttttgatttataagggattttgccgatttcggcctattggttaaaaaatgagctgatttaacaaaaatttaacgcgaattttaacaaaatattaacgcttacaatttccattcgccattcaggctgcgcaactgttgggaagggcgatcggtgcgggcctcttcgctattacgccagctggcgaaagggggatgtgctgcaaggcgattaagttgggtaacgccagggttttcccagtcacgacgttgtaaaacgacggccagtgagcgcgcgtaatacgactcactatagggcgaattgggtac

SEQ ID NO: 42 - DNA, 4766 bp, Toxoplasma gondii
ctagcagcaagttgagtgacagcgtgcgtcgtgcgacagggcaagtgtaccaaaagtcacatcggaggtgtaccggtgaacgaaggaggttagaaacagaagtgacacgagctagactcgaccagagagtcttttttcaccgagcaaggggacgcaatgctgctgactcgatgaacgctcttcagtcccggctggcgacgtcgagcaactggccggtcattgcgacgcgagaatgcgacgcgagaatgcgacgcgacacaccagagacccgtggtctcctatttaggtgggttccggtgacacgtctgtcgagtttttagcagcatgttgcatcacccccgtcgctcgagccattgcagagctaccaagcacgagtggttacctagcaattgaagatcgaatcacgcctgtgttgcggcgtgattgcacgactcccctaaaagcgacactgcagctcatcgagctccgtgccaatggcggggacgagggtgtgatacttgttgaccaggcgggacagcggccgctaacagtgcacagtgaggtctgatgaacacactggaaactctgtgacctttcgcgcagcaccgtcaacgacagttgtctcccgatttctgcggaggggacgcttccctgcgggcgtcgtccgtgtcgaccggcttgttttttcccgtaggagtctatggcaaaacttgacggtaggacacgattttggtgagcaaaaaatgaggccgaaggcggaaaaactcaggacgaggaaagtaggcacagtgaggccttccacaagggcactgctgccgcttttaaaaaggcgagttcaactagcttacagggaaatgattctctgccgagagcctgaatcgcaacataacgactctgaacctgatgcatttccaaaagtcgcgtgacacgcaacttcttggcacacggtgcacaccagaatcgccaccaaagagacggagcggggcttgccgccgacagaagcgacgcacacgccactcttctgcttcacatctctgtgcctctggagttgtgtgtgtcacaagcgagtgaagaagttcgcattcgttgtccagcaaaacgggacgaagccttcacttcgtgagtggagagtcgagcggccttccatgtgacctttctgttcgcccccccccccccccccactttcctccgtgtgccgccgtacctgtcatcctaggcgtggagagagagtgtgtataatgcagaagttatcggcggcattttacgttatcgtctctcatctcaaaaacgtctacactgacatctacttcctcctacgcgctgctgcgggtgtcacctaagggacatttacacgcggtgtggagtcataccaggggtgtgaaatgcagggaaaagtacggaagaagagaagactagacttctcggtcctgcgccctcactcgggggggtctgccaaactccctccgccttcgactcctactgagccgcgcttctcaaggatttaccttccagctgtttcggagacaaaagatttgtttcctccgagaaccacatcgactagacaacaaccgatgtgaccatgggtgtcagcagatgccgtacacacggggggtaagtcgtatgcatacctcgcaagtccacacattggtgtgcttgcatccatttttgaaagcatacgcatgcacttgtatgcaccagcatgacgaccgctgtggacgccccgtgcttctctgaaaacttgtgtgaacttgtttgcttcgggatgcctctcccgaccccaaaacagaggaggtcggaggaacaaaggaaaagtacggtgagtgagcgacgatgcagggtccagaaactaggtaagtccagcgaaacgaatagaagctgaacagaaatggcaacgggaacgggcaaatttgactgggaaactcaaggcgaagacagtggacatctcgtcatgcaggtccttcacttttcttcaactgtttctcggcgagttccttctgctgagcgcgattgcagctccagagcttgactgtgcagtcgagggatcctgtacagtcgacaacaaaatacagaagcagcggaaacaacgaatgtgcgaaagagaaacatgtggaaagaaaatgtcctcgaaaaaggaggaacaacccacgcgccgtagataaaagagagactcatctatgcgcggtcactaccttacttgccaatgcagacatacggtttcttggatccgtcggcaaacctactgtgcacggacttaggtgcatgggtaaacacatgaaaagagaaaggcttatttcgaacccccagctctgcagccctgtcgcttatcggtttgccttcttcatgtgatagctgccttccacctcacatgcgggtgcttctctcatccactccgattctatcaaatttccctgtcgtcacctcaatggcctcacacatacatacagtgaaaccgaacatattcagaggcactgggaggcataatgcgatgtgccaatcttcacatgaagcaaaaagaattgttcttcccaagaggaattccacgtggatatctctagttctagagcggccgccaccgcggtggagctccagcttttgttccctttagtgagggttaattgcgcgcttggcgtaatcatggtcatagctgtttcctgtgtgaaattgttatccgctcacaattccacacaacatacgagccggaagcataaagtgtaaagcctggggtgcctaatgagtgagctaactcacattaattgcgttgcgctcactgcccgctttccagtcgggaaacctgtcgtgccagctgcattaatgaatcggccaacgcgcggggagaggcggtttgcgtattgggcgctcttccgcttcctcgctcactgactcgctgcgctcggtcgttcggctgcggcgagcggtatcagctcactcaaaggcggtaatacggttatccacagaatcaggggataacgcaggaaagaacatgtgagcaaaaggccagcaaaaggccaggaaccgtaaaaaggccgcgttgctggcgtttttccataggctccgcccccctgacgagcatcacaaaaatcgacgctcaagtcagaggtggcgaaacccgacaggactataaagataccaggcgtttccccctggaagctccctcgtgcgctctcctgttccgaccctgccgcttaccggatacctgtccgcctttctcccttcgggaagcgtggcgctttctcatagctcacgctgtaggtatctcagttcggtgtaggtcgttcgctccaagctgggctgtgtgcacgaaccccccgttcagcccgaccgctgcgccttatccggtaactatcgtcttgagtccaacccggtaagacacgacttatcgccactggcagcagccactggtaacaggattagcagagcgaggtatgtaggcggtgctacagagttcttgaagtggtggcctaactacggctacactagaaggacagtatttggtatctgcgctctgctgaagccagttaccttcggaaaaagagttggtagctcttgatccggcaaacaaaccaccgctggtagcggtggtttttttgtttgcaagcagcagattacgcgcagaaaaaaaggatctcaagaagatcctttgatcttttctacggggtctgacgctcagtggaacgaaaactcacgttaagggattttggtcatgagattatcaaaaaggatcttcacctagatccttttaaattaaaaatgaagttttaaatcaatctaaagtatatatgagtaaacttggtctgacagttaccaatgcttaatcagtgaggcacctatctcagcgatctgtctatttcgttcatccatagttgcctgactccccgtcgtgtagataactacgatacgggagggcttaccatctggccccagtgctgcaatgataccgcgagacccacgctcaccggctccagatttatcagcaataaaccagccagccggaagggccgagcgcagaagtggtcctgcaactttatccgcctccatccagtctattaattgttgccgggaagctagagtaagtagttcgccagttaatagtttgcgcaacgttgttgccattgctacaggcatcgtggtgtcacgctcgtcgtttggtatggcttcattcagctccggttcccaacgatcaaggcgagttacatgatcccccatgttgtgcaaaaaagcggttagctccttcggtcctccgatcgttgtcagaagtaagttggccgcagtgttatcactcatggttatggcagcactgcataattctcttactgtcatgccatccgtaagatgcttttctgtgactggtgagtactcaaccaagtcattctgagaatagtgtatgcggcgaccgagttgctcttgcccggcgtcaatacgggataataccgcgccacatagcagaactttaaaagtgctcatcattggaaaacgttcttcggggcgaaaactctcaaggatcttaccgctgttgagatccagttcgatgtaacccactcgtgcacccaactgatcttcagcatcttttactttcaccagcgtttctgggtgagcaaaaacaggaaggcaaaatgccgcaaaaaagggaataagggcgacacggaaatgttgaatactcatactcttcctttttcaatattattgaagcatttatcagggttattgtctcatgagcggatacatatttgaatgtatttagaaaaataaacaaataggggttccgcgcacatttccccgaaaagtgccac

SEQ ID NO: 43 - DNA, 50 bp, artificial sequence
  primer
gggatccactagtttacgtatcgcgactagcagcaagttgagtgacagcg

SEQ ID NO: 44 - DNA, 48 bp, artificial sequence
  primer
gctgcagtctagagatatccacgtggaattcctcttgggaagaacaat

SEQ ID NO: 45 - DNA, 10285 bp, artificial sequence
  plasmid
ggccgccaccgcggtggagctccagcttttgttccctttagtgagggttaattgcgcgcttggcgtaatcatggtcatagctgtttcctgtgtgaaattgttatccgctcacaattccacacaacatacgagccggaagcataaagtgtaaagcctggggtgcctaatgagtgagctaactcacattaattgcgttgcgctcactgcccgctttccagtcgggaaacctgtcgtgccagctgcattaatgaatcggccaacgcgcggggagaggcggtttgcgtattgggcgctcttccgcttcctcgctcactgactcgctgcgctcggtcgttcggctgcggcgagcggtatcagctcactcaaaggcggtaatacggttatccacagaatcaggggataacgcaggaaagaacatgtgagcaaaaggccagcaaaaggccaggaaccgtaaaaaggccgcgttgctggcgtttttccataggctccgcccccctgacgagcatcacaaaaatcgacgctcaagtcagaggtggcgaaacccgacaggactataaagataccaggcgtttccccctggaagctccctcgtgcgctctcctgttccgaccctgccgcttaccggatacctgtccgcctttctcccttcgggaagcgtggcgctttctcatagctcacgctgtaggtatctcagttcggtgtaggtcgttcgctccaagctgggctgtgtgcacgaaccccccgttcagcccgaccgctgcgccttatccggtaactatcgtcttgagtccaacccggtaagacacgacttatcgccactggcagcagccactggtaacaggattagcagagcgaggtatgtaggcggtgctacagagttcttgaagtggtggcctaactacggctacactagaaggacagtatttggtatctgcgctctgctgaagccagttaccttcggaaaaagagttggtagctcttgatccggcaaacaaaccaccgctggtagcggtggtttttttgtttgcaagcagcagattacgcgcagaaaaaaaggatctcaagaagatcctttgatcttttctacggggtctgacgctcagtggaacgaaaactcacgttaagggattttggtcatgagattatcaaaaaggatcttcacctagatccttttaaattaaaaatgaagttttaaatcaatctaaagtatatatgagtaaacttggtctgacagttaccaatgcttaatcagtgaggcacctatctcagcgatctgtctatttcgttcatccatagttgcctgactccccgtcgtgtagataactacgatacgggagggcttaccatctggccccagtgctgcaatgataccgcgagacccacgctcaccggctccagatttatcagcaataaaccagccagccggaagggccgagcgcagaagtggtcctgcaactttatccgcctccatccagtctattaattgttgccgggaagctagagtaagtagttcgccagttaatagtttgcgcaacgttgttgccattgctacaggcatcgtggtgtcacgctcgtcgtttggtatggcttcattcagctccggttcccaacgatcaaggcgagttacatgatcccccatgttgtgcaaaaaagcggttagctccttcggtcctccgatcgttgtcagaagtaagttggccgcagtgttatcactcatggttatggcagcactgcataattctcttactgtcatgccatccgtaagatgcttttctgtgactggtgagtactcaaccaagtcattctgagaatagtgtatgcggcgaccgagttgctcttgcccggcgtcaatacgggataataccgcgccacatagcagaactttaaaagtgctcatcattggaaaacgttcttcggggcgaaaactctcaaggatcttaccgctgttgagatccagttcgatgtaacccactcgtgcacccaactgatcttcagcatcttttactttcaccagcgtttctgggtgagcaaaaacaggaaggcaaaatgccgcaaaaaagggaataagggcgacacggaaatgttgaatactcatactcttcctttttcaatattattgaagcatttatcagggttattgtctcatgagcggatacatatttgaatgtatttagaaaaataaacaaataggggttccgcgcacatttccccgaaaagtgccacctgacgcgccctgtagcggcgcattaagcgcggcgggtgtggtggttacgcgcagcgtgaccgctacacttgccagcgccctagcgcccgctcctttcgctttcttcccttcctttctcgccacgttcgccggctttccccgtcaagctctaaatcgggggctccctttagggttccgatttagtgctttacggcacctcgaccccaaaaaacttgattagggtgatggttcacgtagtgggccatcgccctgatagacggtttttcgccctttgacgttggagtccacgttctttaatagtggactcttgttccaaactggaacaacactcaaccctatctcggtctattcttttgatttataagggattttgccgatttcggcctattggttaaaaaatgagctgatttaacaaaaatttaacgcgaattttaacaaaatattaacgcttacaatttccattcgccattcaggctgcgcaactgttgggaagggcgatcggtgcgggcctcttcgctattacgccagctggcgaaagggggatgtgctgcaaggcgattaagttgggtaacgccagggttttcccagtcacgacgttgtaaaacgacggccagtgagcgcgcgtaatacgactcactatagggcgaattgggtaccacaagctaaagaaactagtgcctcttctaaagtgggcatggccaaaacagttccttccccactttcgaagaccgctcctcctttaaaagcagatccaagtgagcccgtaccaaccaaggtaggcggaggttctgtcggaggacctaaagccaccccatcgccgagcaaagcaggtcctccgccaaaggacagtgacaagccgggcggcgtggcaaaaaaagcgagcccaacgccaccttcaaaggcagaaggagtagcagcttcaggaagtggagacgcccctgaggaacccaaatcagtgaaaggcgcaccactaggcaaaaagggcccgggccctctcggagtgaagggcggctctcccttaccccctccgggagatgccaagggtaaagcatcacctgaatctgccaccgccaaaggtcctgcggagcttccgaaggggcctgcgggggctgcaaaggctgcagtccctggcaaagccgcgccggtcggaccgggaaaagggcccgcggccccattagggaagaaggctcctggggaacctgtgggcaagccgaaagcagagatgaagaagagttctccaccagtgggagagccgaaggctgaagtgaagaagagccctcccccaccatcaggcagcccaaaagccgaatcgaagaagagtccctctccaccactgggcgagccgaaggcagatgtaaagaagagccctcctccaccactgggtggacctaaggcagaaatgaagaaaagtcctcccggggcgtctccagcagcaccaaaggctgacagcagcactcccgcggcaccgaccggcgccactccgccgaaggccaaactcggagcgccgccaggcaaggcgccgactgctggaactgctgagggcaaagaagcggccccagcgaagaaaggtccgttgcccgcaaaaggagcggagccactaggcaagaagggacctccaccggttgcaaaggcagaagacacaacgaaaccgccgccgccaactgcgggtcagaatgatgatgcggacggtgcaggtgtatctgccaaaaaacaatcacctctcgggaagggtccgccgccgaaaaaagggcccctgctgggaaagaagattcctccggctccggacgcacgagacgcgaaagtgaggccagtcagcgatttggacacccacacagctagcctgaccaggctgacacatcaagagatgttctaaaagatttctgaaagagggaactgggaaacgtgggattcaaccagtacactagagtgatgcttttcacaggacatttctcagggggttttacgacgtttttgctctctgctcaacgtcaaatttaacgtcagtccgcgttttggttgtgtccctccgcggtgctggtgaccaggctgacgacgcttcaccggcgaaaaaagggccacccaaaggtctccccaaaggaaaagcaccccctaagggtacgttgacaagacaaaagtatatggttaccactcgcttcttttctttagtggcactcacacttcaatacggcatgcatggaagtttaccagcgggtgatgccaaagatgcagaaaacagagacggcttttcttcgttgtatgtgcgcaagttcttcgctccccgttgtcactgtaattgcttcactgcacattagtagctcgctttatgtgcgattcacatagtcaactagttgcggcaggttgactggtaagcagcagcagccagttccgagttttacttctttctcttatttgcgtccaggcaaaggatttctttgagacgtggtcaaccccatgttgcaaccggcagtgccgcaaacaaatatgtctactctggtggcaagagacagatctactggcactcgccgatcgttccatctgggtggtggtacgcctatctgtcgatttccagcaaagacattcccagcgagctccttgttcgtgcatgaacctacatagtatgtggcttcgcatcttcctacaaacgactgtctacagggaaaatatgagcgcccgagtcatttttcgagtaaacaccagaacaaactcccctcgtgccccggcgcggttgcccccagtccctgtgtcgcgagagaagcgtccgtcactgcacctttgcagactcccgtctagcaagacctcaaatgcgctaaaaaagctcaacaagggtagccatgtacaaactctgcagttatttattgccttctaccagaagtcccatgttgcagatctctccaaaaatgtgatcgcggcatctcgtatcaaataacttttacatagagatgttgttgtaccaccaagcttgagcttgacccggctatagaatttacctgcatcgatgaagcttataacttcgtatagtataccttatacgaagttatgatatgcatgtccgcgttcgtgaaatctctgatcaagcggagtgatcaggaatcatcgtctcagcgggatgacgttgcggagcaggccggctcgcggtgggcagtcagatgccgaaggcgtaactcaggacggcttgcgctcatcgcagaacaggggtggtgcctgcattgggtgcggttggtgatcctggttggaccggtggagatgcgcgcgcacgaaggggatgtgtcagaaacattttgtttgttctctgtgaacttttagatgtgttaaaggcggcgaatattagcagagagtcctccttgttggattctctcttgaatttcgccctttccttctctttgcgagtctcgtagagaacaagcactcgttcgccgtccctgacgacgcaacccgcgcagaagacatccaccaaacggtgttacacaatcaccttgtgtgaagttcttgcggaaaactactcgttggcattttttcttgaattccctttttcgacaaaatgcatgagaaaaaaatcactggatataccaccgttgatatatcccaatcgcatcgtaaagaacattttgaggcatttcagtcagttgctcaatgtacctataaccagaccgttcagctggatattacggcctttttaaagaccgtaaagaaaaataagcacaagttttatccggcctttattcacattcttgcccgcctgatgaatgctcatccggaattccgtatggcaatgaaagacggtgagctggtgatatgggatagtgttcacccttgttacaccgttttccatgagcaaactgaaacgttttcatcgctctggagtgaataccacgacgatttccggcagtttctacacatatattcgcaagatgtggcgtgttacggtgaaaacctggcctatttccctaaagggtttattgagaatatgtttttcgtctcagccaatccctgggtgagtttcaccagttttgatttaaacgtggccaatatggacaacttcttcgcccccgttttcaccatgggcaaatattatacgcaaggcgacaaggtgctgatgccgctggcgattcaggttcatcatgccgtctgtgatggcttccatgtcggcagaatgcttaatgaattacaacagtactgcgatgagtggcagggcggggctcctaggatggtgagcaagggcgaggagctgttcaccggggtggtgcccatcctggtcgagctggacggcgacgtaaacggccacaagttcagcgtgtccggcgagggcgagggcgatgccacctacggcaagctgaccctgaagttcatctgcaccaccggcaagctgcccgtgccctggcccaccctcgtgaccaccctgacctacggcgtgcagtgcttcagccgctaccccgaccacatgaagcagcacgacttcttcaagtccgccatgcccgaaggctacgtccaggagcgcaccatcttcttcaaggacgacggcaactacaagacccgcgccgaggtgaagttcgagggcgacaccctggtgaaccgcatcgagctgaagggcatcgacttcaaggaggacggcaacatcctggggcacaagctggagtacaactacaacagccacaacgtctatatcatggccgacaagcagaagaacggcatcaaggtgaacttcaagatccgccacaacatcgaggacggcagcgtgcagctcgccgaccactaccagcagaacacccccatcggcgacggccccgtgctgctgcccgacaaccactacctgagcacccagtccgccctgagcaaagaccccaacgagaagcgcgatcacatggtcctgctggagttcgtgaccgccgccgggatcactctcggcatggacgagctgtacaagtactcagatctcgagctcgctaggaatgcattagaggtccacacgaaccaggacccgctcgattaattaatcaccgttgtgctcacttctcaaatcgacaaaggaaacacacttcgtgcagcatgtgccccattataaagaaactgagttgttccgttgtggcttgcaggtgtcacatccacagaaaccggccgactctaaataggagtgtttcgcagcaagcagcgaaagtttatgactgggtccgaatctctgaacggatgtgtggcggacctggctgatgttgatcgccgtcgacacacgcgccacatgggtcaatacacaagacagctatcagttgttctagtcgaaccggttaacacaattcttgcccccccgagggataacttcgtatagtataccttatacgaagttatggatctagaaggctctgaaaaatgttgaaaacgcatgtgtactaggttattttcgccgacttccggtggctcctccacttggttggttcactcactgtagtgcactgtaagtaagtttcgagatcaggtgaggtggaacgggaccgtctcgattgtcaaatcctacagtacttagaacagtgatttttcagatactactgcacgcagtcgtctaccagactccgattctttatagcgcgcattagtaaacggtgttttggtagccgtaaagatgtgcagtgacggaagaaaacgtcatttccacggatgacgtgaggtagagcagttccgacactagatggggacactcccggtaaacagtatcacaggtcgccgcaaaccgtgcaccttctctcttttaagctgtgacctttactcggattcaaattaattgtcttcgttttctcaaaaaacccgaagctgcaccaccggaaaacactttgaacgaaggtacccctttttctttctgtgaatacggtttcggggatttttcgacccaccgttcaagggcggacaattactgagcagcaccgacacggcctccttttttagtcaccatgtatcagagaaaaagtgactgaaggtacagctggtgagcaccactacattccgatacaaaggggtgaatgagacggcgtggcaaaattgactgtcttttatctcctgctctgtattgctttcgtttagtaatccccgtcttccactgaacgatcagtctgtactccggtggttgacacgctaatatgtgacgctggctgcttactagaaatcgcgtgttcttcagtgaaatgacctgaaacttttcattaggagtctgctttcatcgttacgcgttctagcgagtgagcctgcacaacgtccacatagtgcaggtgtggaggtggttcagtacgcgccagcagtacacatgcgaaaaaccatcggaaatattatcagaaaccggtatcactgactccctgtcgcatctgtgaccatctgactgttctgccgtaatcaaaggcggtgaaatttgatgtctcacttcaaaaacaacgacgccaggacagaaacaccaccacaggcacacagtacattttgagaggggacaccttttttgccaagaagaccgaggcgaagttccgagaacagaaatgctcactatctgtgcgcgcttatcctaaatgagttcacgacatctataaattcagatcgtttcgacgaatattaagctccctaagcaagcagaatctgccttaacgcttatcgtaggccttctgacaatcgataaacgctggtcacaacaacacgatcatctacaactattgcgctctaaattgaaatggtcaagtgcctttacttcacggaggttgtgatcacaattccaagagattctcacgtgttccttgacattaaatggcgcagccagaagctatacacggcttcgatatactttttttatcaccggcctccgtctctcgggccaaggcgcttgtcgcggctttttgaacggcctcgatttgttttatcgtggggatgcgtaagtgcggccactgtcagcgaatcgctgctgaatgttgacggcgataagcgtgagcaactcttctcctgactcttctctgaaaccactgctgatcaaagcttagtgttttcaagaatgatacggcgcaacctcggccgatttcgccacgacactgtgaactaccattgacgcttccgccgtctcgcatttagcaccgctgtctaccacatagagtaattacggcaattgtagcgcgcacgcattgagatgagaggacgtatctccaccaacccatcacgtgcgaaacaaatttgctttgcaaatattcacacttgtagataccgattgtccgtcacggggaaagtcgtagcgagggggcagcgaaccggtgcatgcacactcctcactggaggaccgcaagacaaaccccaggtttttccacagtttctttttcttgcgtcaccacagtgatattgcacacgcactttctgaactcgtgttgaccagaacagtttcacaaatgtcgacgtctagcggagtgttacgtgaatgctgagagacttgtccgacaaatttgacgtgttggtgcttttcggggtgcggtggtaaagccgtttgcagccggtgattgccctgcagttgcatatgcccgtcaccacacttcatcagactaatgccactaggtagcgttgcctgttaccttttctgagtcgcactgtgtacgaactgaccccgggaactgtgtgtctactgtatgccgtcattggtggcggttccgtaactatggcaatagaaagcggaggactgggtcctcggactctgatcccgagaattcttctgatatcatcatggcaaagaggtgcccaaccagacgagggaacgaaggaaacagaaccacaactcgttcaaggagatgctccaggcagctctgggaatctgtcctccccgcagtggaagccagctaatcaccagctgcttgagattttgctccctcatccgtcccaaccgagcgtagttgtagcctttttatggtcaaactccacattgtatgaactgaatcagtttactcgtgacgtgggactgacatcggttctccttagatcacctgagttcgtgctggggaacggggcgcttcttgcagcgacaccttttgaccctctatttattttccttgctcttctttatgc

SEQ ID NO: 46 - DNA, 90 bp, artificial sequence; identical to SEQ ID NO: 7
  primer

SEQ ID NO: 47 - DNA, 90 bp, artificial sequence; identical to SEQ ID NO: 8
  primer

SEQ ID NO: 48 - DNA, 18 bp, artificial sequence
  primer
gcattcaacaatggtgac

SEQ ID NO: 49 - DNA, 2717 bp, Toxoplasma gondii
tagaaggctctgaaaaatgttgaaaacgcatgtgtactaggttattttcgccgacttccggtggctcctccacttggttggttcactcactgtagtgcactgtaagtaagtttcgagatcaggtgaggtggaacgggaccgtctcgattgtcaaatcctacagtacttagaacagtgatttttcagatactactgcacgcagtcgtctaccagactccgattctttatagcgcgcattagtaaacggtgttttggtagccgtaaagatgtgcagtgacggaagaaaacgtcatttccacggatgacgtgaggtagagcagttccgacactagatggggacactcccggtaaacagtatcacaggtcgccgcaaaccgtgcaccttctctcttttaagctgtgacctttactcggattcaaattaattgtcttcgttttctcaaaaaacccgaagctgcaccaccggaaaacactttgaacgaaggtacccctttttctttctgtgaatacggtttcggggatttttcgacccaccgttcaagggcggacaattactgagcagcaccgacacggcctccttttttagtcaccatgtatcagagaaaaagtgactgaaggtacagctggtgagcaccactacattccgatacaaaggggtgaatgagacggcgtggcaaaattgactgtcttttatctcctgctctgtattgctttcgtttagtaatccccgtcttccactgaacgatcagtctgtactccggtggttgacacgctaatatgtgacgctggctgcttactagaaatcgcgtgttcttcagtgaaatgacctgaaacttttcattaggagtctgctttcatcgttacgcgttctagcgagtgagcctgcacaacgtccacatagtgcaggtgtggaggtggttcagtacgcgccagcagtacacatgcgaaaaaccatcggaaatattatcagaaaccggtatcactgactccctgtcgcatctgtgaccatctgactgttctgccgtaatcaaaggcggtgaaatttgatgtctcacttcaaaaacaacgacgccaggacagaaacaccaccacaggcacacagtacattttgagaggggacaccttttttgccaagaagaccgaggcgaagttccgagaacagaaatgctcactatctgtgcgcgcttatcctaaatgagttcacgacatctataaattcagatcgtttcgacgaatattaagctccctaagcaagcagaatctgccttaacgcttatcgtaggccttctgacaatcgataaacgctggtcacaacaacacgatcatctacaactattgcgctctaaattgaaatggtcaagtgcctttacttcacggaggttgtgatcacaattccaagagattctcacgtgttccttgacattaaatggcgcagccagaagctatacacggcttcgatatactttttttatcaccggcctccgtctctcgggccaaggcgcttgtcgcggctttttgaacggcctcgatttgttttatcgtggggatgcgtaagtgcggccactgtcagcgaatcgctgctgaatgttgacggcgataagcgtgagcaactcttctcctgactcttctctgaaaccactgctgatcaaagcttagtgttttcaagaatgatacggcgcaacctcggccgatttcgccacgacactgtgaactaccattgacgcttccgccgtctcgcatttagcaccgctgtctaccacatagagtaattacggcaattgtagcgcgcacgcattgagatgagaggacgtatctccaccaacccatcacgtgcgaaacaaatttgctttgcaaatattcacacttgtagataccgattgtccgtcacggggaaagtcgtagcgagggggcagcgaaccggtgcatgcacactcctcactggaggaccgcaagacaaaccccaggtttttccacagtttctttttcttgcgtcaccacagtgatattgcacacgcactttctgaactcgtgttgaccagaacagtttcacaaatgtcgacgtctagcggagtgttacgtgaatgctgagagacttgtccgacaaatttgacgtgttggtgcttttcggggtgcggtggtaaagccgtttgcagccggtgattgccctgcagttgcatatgcccgtcaccacacttcatcagactaatgccactaggtagcgttgcctgttaccttttctgagtcgcactgtgtacgaactgaccccgggaactgtgtgtctactgtatgccgtcattggtggcggttccgtaactatggcaatagaaagcggaggactgggtcctcggactctgatcccgagaattcttctgatatcatcatggcaaagaggtgcccaaccagacgagggaacgaaggaaacagaaccacaactcgttcaaggagatgctccaggcagctctgggaatctgtcctccccgcagtggaagccagctaatcaccagctgcttgagattttgctccctcatccgtcccaaccgagcgtagttgtagcctttttatggtcaaactccacattgtatgaactgaatcagtttactcgtgacgtgggactgacatcggttctccttagatcacctgagttcgtgctggggaacggggcgcttcttgcagcgacaccttttgaccctctatttattttccttgctcttctttat

SEQ ID NO: 50 - DNA, 44 bp, artificial sequence
  primer
gtagcaaggtaccacaagctaaagaaactagtgcctcttctaaa

SEQ ID NO: 51 - DNA, 44 bp, artificial sequence; identical to SEQ ID NO: 50
  primer

SEQ ID NO: 52 - DNA, 2339 bp, artificial sequence
  product PCR
acaagctaaagaaactagtgcctcttctaaagtgggcatggccaaaacagttccttccccactttcgaagaccgctcctcctttaaaagcagatccaagtgagcccgtaccaaccaaggtaggcggaggttctgtcggaggacctaaagccaccccatcgccgagcaaagcaggtcctccgccaaaggacagtgacaagccgggcggcgtggcaaaaaaagcgagcccaacgccaccttcaaaggcagaaggagtagcagcttcaggaagtggagacgcccctgaggaacccaaatcagtgaaaggcgcaccactaggcaaaaagggcccgggccctctcggagtgaagggcggctctcccttaccccctccgggagatgccaagggtaaagcatcacctgaatctgccaccgccaaaggtcctgcggagcttccgaaggggcctgcgggggctgcaaaggctgcagtccctggcaaagccgcgccggtcggaccgggaaaagggcccgcggccccattagggaagaaggctcctggggaacctgtgggcaagccgaaagcagagatgaagaagagttctccaccagtgggagagccgaaggctgaagtgaagaagagccctcccccaccatcaggcagcccaaaagccgaatcgaagaagagtccctctccaccactgggcgagccgaaggcagatgtaaagaagagccctcctccaccactgggtggacctaaggcagaaatgaagaaaagtcctcccggggcgtctccagcagcaccaaaggctgacagcagcactcccgcggcaccgaccggcgccactccgccgaaggccaaactcggagcgccgccaggcaaggcgccgactgctggaactgctgagggcaaagaagcggccccagcgaagaaaggtccgttgcccgcaaaaggagcggagccactaggcaagaagggacctccaccggttgcaaaggcagaagacacaacgaaaccgccgccgccaactgcgggtcagaatgatgatgcggacggtgcaggtgtatctgccaaaaaacaatcacctctcgggaagggtccgccgccgaaaaaagggcccctgctgggaaagaagattcctccggctccggacgcacgagacgcgaaagtgaggccagtcagcgatttggacacccacacagctagcctgaccaggctgacacatcaagagatgttctaaaagatttctgaaagagggaactgggaaacgtgggattcaaccagtacactagagtgatgcttttcacaggacatttctcagggggttttacgacgtttttgctctctgctcaacgtcaaatttaacgtcagtccgcgttttggttgtgtccctccgcggtgctggtgaccaggctgacgacgcttcaccggcgaaaaaagggccacccaaaggtctccccaaaggaaaagcaccccctaagggtacgttgacaagacaaaagtatatggttaccactcgcttcttttctttagtggcactcacacttcaatacggcatgcatggaagtttaccagcgggtgatgccaaagatgcagaaaacagagacggcttttcttcgttgtatgtgcgcaagttcttcgctccccgttgtcactgtaattgcttcactgcacattagtagctcgctttatgtgcgattcacatagtcaactagttgcggcaggttgactggtaagcagcagcagccagttccgagttttacttctttctcttatttgcgtccaggcaaaggatttctttgagacgtggtcaaccccatgttgcaaccggcagtgccgcaaacaaatatgtctactctggtggcaagagacagatctactggcactcgccgatcgttccatctgggtggtggtacgcctatctgtcgatttccagcaaagacattcccagcgagctccttgttcgtgcatgaacctacatagtatgtggcttcgcatcttcctacaaacgactgtctacagggaaaatatgagcgcccgagtcatttttcgagtaaacaccagaacaaactcccctcgtgccccggcgcggttgcccccagtccctgtgtcgcgagagaagcgtccgtcactgcacctttgcagactcccgtctagcaagacctcaaatgcgctaaaaaagctcaacaagggtagccatgtacaaactctgcagttatttattgccttctaccagaagtcccatgttgcagatctctccaaaaatgtgatcgcggcatctcgtatcaaataacttttacatagagatgttgttgtaccaccaagcttgagcttgacccggctatagaatttacctgcatcga

SEQ ID NO: 53 - DNA, 40 bp, artificial sequence
  primer
taaacgggctgatcgatgcaggtaaattctatagccgggt

SEQ ID NO: 54 - DNA, 40 bp, artificial sequence
  primer
aaaaactcggtggcggccgcataaagaagagcaaggaaaa

SEQ ID NO: 55 - DNA, 20 bp, artificial sequence
  primer
atgcgcgctataaagaatcg

SEQ ID NO: 56 - DNA, 20 bp, artificial sequence
  primer
agaaacaacgcctggcccat

SEQ ID NO: 57 - DNA, 30 bp, artificial sequence
  primer
gtgcgatgacgtggcttctctatcatgtgt

SEQ ID NO: 58 - DNA, 30 bp, artificial sequence
  primer
gattcgcttcgtcacttctggtacggatgc

SEQ ID NO: 59 - DNA, 20 bp, artificial sequence
  primer
cccgtctagcaagacctcaa

SEQ ID NO: 60 - DNA, 20 bp, artificial sequence
  primer
tcggtgctgctcagtaattg

SEQ ID NO: 61 - DNA, 20 bp, artificial sequence
  primer
cctccgatgtgacttttggt

SEQ ID NO: 62 - DNA, 20 bp, artificial sequence
  primer
gatcctcggagcaagtcaac

SEQ ID NO: 63 - DNA, 20 bp, artificial sequence
  primer
atacgaagggattcgacgtg

SEQ ID NO: 64 - DNA, 23 bp, artificial sequence
  primer
atatgcggatgagtgctcgaatt

SEQ ID NO: 65 - DNA, 27 bp, artificial sequence
  primer
gtgtggagactttttacttcgtgttac

SEQ ID NO: 66 - DNA, 20 bp, artificial sequence
  primer
cctccgatgtgacttttggt

SEQ ID NO: 67 - DNA, 12721 bp, artificial sequence
  plasmid
catgtgagcaaaaggccagcaaaaggccaggaaccgtaaaaaggccgcgttgctggcgtttttccataggctccgcccccctgacgagcatcacaaaaatcgacgctcaagtcagaggtggcgaaacccgacaggactataaagataccaggcgtttccccctggaagctccctcgtgcgctctcctgttccgaccctgccgcttaccggatacctgtccgcctttctcccttcgggaagcgtggcgctttctcatagctcacgctgtaggtatctcagttcggtgtaggtcgttcgctccaagctgggctgtgtgcacgaaccccccgttcagcccgaccgctgcgccttatccggtaactatcgtcttgagtccaacccggtaagacacgacttatcgccactggcagcagccactggtaacaggattagcagagcgaggtatgtaggcggtgctacagagttcttgaagtggtggcctaactacggctacactagaaggacagtatttggtatctgcgctctgctgaagccagttaccttcggaaaaagagttggtagctcttgatccggcaaacaaaccaccgctggtagcggtggtttttttgtttgcaagcagcagattacgcgcagaaaaaaaggatctcaagaagatcctttgatcttttctacggggtctgacgctcagtggaacgaaaactcacgttaagggattttggtcatgagattatcaaaaaggatcttcacctagatccttttaaattaaaaatgaagttttaaatcaatctaaagtatatatgagtaaacttggtctgacagttaccaatgcttaatcagtgaggcacctatctcagcgatctgtctatttcgttcatccatagttgcctgactccccgtcgtgtagataactacgatacgggagggcttaccatctggccccagtgctgcaatgataccgcgagacccacgctcaccggctccagatttatcagcaataaaccagccagccggaagggccgagcgcagaagtggtcctgcaactttatccgcctccatccagtctattaattgttgccgggaagctagagtaagtagttcgccagttaatagtttgcgcaacgttgttgccattgctacaggcatcgtggtgtcacgctcgtcgtttggtatggcttcattcagctccggttcccaacgatcaaggcgagttacatgatcccccatgttgtgcaaaaaagcggttagctccttcggtcctccgatcgttgtcagaagtaagttggccgcagtgttatcactcatggttatggcagcactgcataattctcttactgtcatgccatccgtaagatgcttttctgtgactggtgagtactcaaccaagtcattctgagaatagtgtatgcggcgaccgagttgctcttgcccggcgtcaatacgggataataccgcgccacatagcagaactttaaaagtgctcatcattggaaaacgttcttcggggcgaaaactctcaaggatcttaccgctgttgagatccagttcgatgtaacccactcgtgcacccaactgatcttcagcatcttttactttcaccagcgtttctgggtgagcaaaaacaggaaggcaaaatgccgcaaaaaagggaataagggcgacacggaaatgttgaatactcatactcttcctttttcaatattattgaagcatttatcagggttattgtctcatgagcggatacatatttgaatgtatttagaaaaataaacaaataggggttccgcgcacatttccccgaaaagtgccacctgacgcgccctgtagcggcgcattaagcgcggcgggtgtggtggttacgcgcagcgtgaccgctacacttgccagcgccctagcgcccgctcctttcgctttcttcccttcctttctcgccacgttcgccggctttccccgtcaagctctaaatcgggggctccctttagggttccgatttagtgctttacggcacctcgaccccaaaaaacttgattagggtgatggttcacgtagtgggccatcgccctgatagacggtttttcgccctttgacgttggagtccacgttctttaatagtggactcttgttccaaactggaacaacactcaaccctatctcggtctattcttttgatttataagggattttgccgatttcggcctattggttaaaaaatgagctgatttaacaaaaatttaacgcgaattttaacaaaatattaacgcttacaatttccattcgccattcaggctgcgcaactgttgggaagggcgatcggtgcgggcctcttcgctattacgccagctggcgaaagggggatgtgctgcaaggcgattaagttgggtaacgccagggttttcccagtcacgacgttgtaaaacgacggccagtgagcgcgcgtaatacgactcactatagggcgaattgggtaccccagaaaccaggtgttgttcttattttaggattttccggctaaccgttgtgactcactgaaccaacctgatatgggtgataagattgatcgtggagtaccgtatgaaacaatatgcctcaactgtaaacgtctttatttaaccaatttaggattcgcgcgaccgcctaaaccgtaaaaggagatggtcgcaggcctgctcaacatccagcctgtgcatcggtgaaaatgaagtgcgccacacgcgtgcacatttccgtgccaggataggcgcgatagggagtgacctgaatccattaggtatcctcctatacggtgaggaagacagttgacaaaggacctggtcgacggacactttgacggatgaagctgaggaaatggcttgtcataaccgttcaattcgggtgcgaatcccactacttgctaacgcctggttcctcctcctccaagaggatagtcccaaaatgtcgactgttgctcgtagggtgcgtttgtgtatgcgagtttcctatacgtacgcgaggagttgtacgcccgtcataattgactgaaagagagcacatcccgtacccagagcagcggcttggatacctgtgagttggaggcaagatgttacagaggtgcaactacttcgacggaaccgtcgttttttctgattccttgcattctgtgttgcaacgagacttttgaaacagggaaaccttgatgaaagacacaatatttcagtgtagaaggaatccgctgcccggcgttctgtgttagctgccaggtcagcttcccccggaacattcttgactagagtcaaataaacatatcgattcttggagtgttgagttcccaatgccaagttgcaatggattgggtaggacgtaacctttctgttcaggaactagaggccgtggcgctctgactttgccttgcggacatgatgtcagattgtcttgcctggcgcacggccatatgtattccattggtctcattgatttgtcgataaatgtccgcctcgagcctgagacccatattcattgcagtttcctccatctctcctgtccagtgctgttagctagtttctttctcatgtgatgctgagtcttgcgagtctcaggtgtgacactggggcagccgtcacggtctaatggtctccgttaagactaagagacgttaccagttcacacgccgccaggagcgccgccggaccgatgtttctcgatttaatgaaatcagtttgaatctctgggtagaacagcaatagacagcaagtcttgcgtgaggacttacgttggatatgaaaagcagtaccatacccagagattttgtcctattcgggccgactccgctgaatttagtaccgtcagtggtaggccttttaatttgtgtacgtgaaagacatagagctgaaaacatcccagaacctcacttggagtcatcgctgcttcagtgttgggcagatccgtaccaaatagtagactcctctatattcaggcttttagtattcaacttcgcgcggccccggaaaacatcggtcctagtatgccgcgcgctatcatttgtgtggcatctgcaagacccgacgctaggacgaacgcgaggacaaagaaacgagacgcagcgtagttgtgtctgcttggacacgagcaggctgtgcgtcgtttcaaacattccgagcgagtctcgtgagcagtcaactaaaatgggaaacgaagcattaaatttatcaaacatacacgataccagcttcatggtgacagttctgatgctagcgctgtgttctagagtagcgagtggctagcggaagacagtaccagccacgttagcagtccagccctgaagtgtttgtcaatgcaccactggataacttcgtataggatactttatacgaagttattgatcaggaatcatcgtctcagcgggatgacgttgcggagcaggccggctcgcggtgggcagtcagatgccgaaggcgtaactcaggacggcttgcgctcatcgcagaacaggggtggtgcctgcattgggtgcggttggtgatcctggttggaccggtggagatgcgcgcgcacgaaggggatgtgtcagaaacattttgtttgttctctgtgaacttttagatgtgttaaaggcggcgaatattagcagagagtcctccttgttggattctctcttgaatttcgccctttccttctctttgcgagtctcgtagagaacaagcactcgttcgccgtccctgacgacgcaacccgcgcagaagacatccaccaaacggtgttacacaatcaccttgtgtgaagttcttgcggaaaactactcgttggcattttttcttgaattccctttttcgacaaaatgcatgagaaaaaaatcactggatataccaccgttgatatatcccaatcgcatcgtaaagaacattttgaggcatttcagtcagttgctcaatgtacctataaccagaccgttcagctggatattacggcctttttaaagaccgtaaagaaaaataagcacaagttttatccggcctttattcacattcttgcccgcctgatgaatgctcatccggaattccgtatggcaatgaaagacggtgagctggtgatatgggatagtgttcacccttgttacaccgttttccatgagcaaactgaaacgttttcatcgctctggagtgaataccacgacgatttccggcagtttctacacatatattcgcaagatgtggcgtgttacggtgaaaacctggcctatttccctaaagggtttattgagaatatgtttttcgtctcagccaatccctgggtgagtttcaccagttttgatttaaacgtggccaatatggacaacttcttcgcccccgttttcaccatgggcaaatattatacgcaaggcgacaaggtgctgatgccgctggcgattcaggttcatcatgccgtctgtgatggcttccatgtcggcagaatgcttaatgaattacaacagtactgcgatgagtggcagggcggggctcctaggatggtgagcaagggcgaggagctgttcaccggggtggtgcccatcctggtcgagctggacggcgacgtaaacggccacaagttcagcgtgtccggcgagggcgagggcgatgccacctacggcaagctgaccctgaagttcatctgcaccaccggcaagctgcccgtgccctggcccaccctcgtgaccaccctgacctacggcgtgcagtgcttcagccgctaccccgaccacatgaagcagcacgacttcttcaagtccgccatgcccgaaggctacgtccaggagcgcaccatcttcttcaaggacgacggcaactacaagacccgcgccgaggtgaagttcgagggcgacaccctggtgaaccgcatcgagctgaagggcatcgacttcaaggaggacggcaacatcctggggcacaagctggagtacaactacaacagccacaacgtctatatcatggccgacaagcagaagaacggcatcaaggtgaacttcaagatccgccacaacatcgaggacggcagcgtgcagctcgccgaccactaccagcagaacacccccatcggcgacggccccgtgctgctgcccgacaaccactacctgagcacccagtccgccctgagcaaagaccccaacgagaagcgcgatcacatggtcctgctggagttcgtgaccgccgccgggatcactctcggcatggacgagctgtacaagtactcagatctcgagctcgctaggaatgcattagaggtccacacgaaccaggacccgctcgattaattaatcaccgttgtgctcacttctcaaatcgacaaaggaaacacacttcgtgcagcatgtgccccattataaagaaactgagttgttccgttgtggcttgcaggtgtcacatccacagaaaccggccgactctaaataggagtgtttcgcagcaagcagcgaaagtttatgactgggtccgaatctctgaacggatgtgtggcggacctggctgatgttgatcgccgtcgacacacgcgccacatgggtcaatacacaagacagctatcagttgttctagtcgaaccgataacttcgtataggatactttatacgaagttatggatccactagttgactgccacgtgtagtatcctcgttgcaaacactttttaatgatgcctctaacacgcgtatggtgtgtcatagagtattcgttcgtcctctgtgagatcattaaaaagaatcaatgcttgcctatggtacacaactgtatctgaaacagcgctctccactgtatcgcattgcagggtattattcacaacacctcagttttttttgccacagattgcttgccagtcacttctgtagacacacgctcgagcaggcggtgcgaaacctcactgttcatttttctaatcaatcatgctccgtttttccgacaattgggggagttttgaacgctggcggaatacgtgttgctacgtttggacttgtgctgggaccacttcagcacgttaatcaggggaccgtcaagcagatccttgctctagatgtgcctatgagaaggaggaactttcatgtggtgcaacggggcgtttaagctgtatcaaaagcgtcacaggaagtgctgccaaacccggaatgcttacagtacttgacaccttgaaactgtgtatgtggtgaagcggcgacgagaaaccgagagtgcttttggcttgcgcttctgagtggtgaagtggaggagccttgagctttctaggccgtggtcgctctctcgtggctttctgattcaggctggatacagcactccgtcatcgtgcctgaacgggattctccatgatccacaacagacgaggatggcagtgcacgcttattggtatcataacgtctttttcgatgaaacactggatgacgctctcaaccgccgtctcaacctctgttagaacctcctgtcggtgtaccttccgcgctggagacgctgaacattctatatgcttacaatgtgaacaaggacatcaagaattgttggctagcaaatcgacgtagagtgcagaagtcactaacgttgtagttgtgatctccagcgatttcggagcatgttatgccgcaagagggggctgacacacatacaaacacgcgttcttaataaaaatgatcaatacactggttcactgtatgccttcgcacacgggggaacaacaccgagagacatcgtgcgtcagtacgttctgaaagtgttctaaggacacatttagtgtggtcggtctccagatctccgcaatgctcttgcactgcattattcgttactgcagaatgcctgattgttgattacggtcgagcgttggattgctgattacagtcgagcgctggaatgttgattactgtcgagctcttcgtgatgacagaagcgctagctgtccaggtgcttagggcaaaatgtgtcttgtgctcgttgcgacgtgggatggtgtgcgtcgcactgagacacgctgcttcatgcctgctacttccctgcggtactattggagcgcctcttgtgtctctcgtgcgtaaccacagtggcagtttaaaacaaaatctggttcgcactgtcaatccctcgaagcctggcaagctgaattcctgtctgctctttggcggtcaccattcagtgggattggccgagattattaattttgtgtgtgaaattgcatggctttgaaacaccacataccacacaacccatccgcgtctcaagactatccgatcaagcgcgtctcgggcgcgtgtgtgttttcgtagagcagtgtgtgtcactttcctattctgtgtgcagtgccacgaggtgacgaacctgccatttgtagtcgtgttgttgtaatcgtgtattatatatatatatatatatatggtgacaactcagattacggatacaacgcagcgtacattgttatgcgacgctcgctttcaaggccaccaacttaagccgggtggtcattgtctgcagactgattccaatttatctacactgtaggtctgggtgttgctttcagccaagcagacaaagccactttgtaaaccagcattcaacaatggtgacaacaaccacgccaacgccacccggtgcgccggcagtggtgcccatcttcgacgttgtctatcaactgaatccgcacgtgtttagaagtcgcttttccaggaggaatcgcgccaggcgtgttgcgagcagcaagtcacgctcgataattcggtggcttgggtatcttacggtgctcgctgccgtcattttgctaggagcgtatgcagtaaggcgtgtatcgcgcgatctgtccgactcagtgcgggaaacacgacgaggcaggagaattacaggcagcgtacctcccgggactacccgtccccgttcagagtcttgtactggcacacaagtggacggcggctgcggcgctgacacgtcaaccgatggaaagtctgagagtgaacagaccgaaaacggggaggactcacgcttttccacccggacccctattcatgtcactgcatcgacttccccattcgcgacgcgcaaggcggcggaagaacgctcttcgagtccgagagacagaaaagttccggagggtgcccaactccccacgtcgtcgacacctcatgcacaaagaaaggactcaggtagtgatagccggaacccatctacactcataccttcaccaggtaccaacacgtttaacatgaacttttatattatcggagcaggctcttcagcgctcgattttattttcccgcacactccggatgctcaggctacagtcgtctcccccccccgcagcgcggcggccgcaccaactgtcgaaacagttccaagggttcgcacttactcgacaccaacaacattaaccctaccaacggcaccagcgaccgccactagcaaccacatgcatgcctcagcgactccctcgccaccggaacgtcctcaaaacttccgtgggggactcatgcggcaaaacggcatggttgaggggacatcgttaacgactaccgaggctgggatgccagcgccgttacaaagccctcaacacattgagacggaggcgaggttaacgtactcaaatcatctcaagagcccgcatacaccagaaactccaactgtccactcaatagaccccgttgtcggcaccagtggccattccgtagcggtgggatcgcagtctccagccggtggacctcctacagatagccgcaccccagcggcactgacccccacaagttcttctttctcacatgcagattctcttgaaacctctgagcatccgcaaagtggaccgtcgcttcatccattaatctccgggatacaagatgccgtgcaaagccaacttccactatcacaacaggagactctccctgtggtagaaaatgcgactttcttcgggccgcaacagactccaccgtggatggacgaaactgcagctgctgcaattccactcgctccctcacaaccagggtcacgtacacaacccatctcgtctccgcatactctactttcccgtagcggcggtgtgtcagctgtgccaggaccacccagaacagaaaaccctcggcaaccacaagttccaggcgaaaactcttactactctgtaccaactgagcggacgatctctgatccaggtccccaaagggcgggtgcggctcaggctgatggtatcggggctggaggcccacgggacacacaatcagcggtaactccatacccgtacgacgtcccggactacgcgtaaaaacttaaaaacttaagctgcagatatcagatctccatgggaggtccacacgaaccaggacccgctcgattaattaatcaccgttgtgctcacttctcaaatcgacaaaggaaacacacttcgtgcagcatgtgccccattataaagaaactgagttgttccgctgtggcttgcaggtgtcacatccacaaaaaccggccgactctaaataggagtgtttcgcagcaagcagcgaaagtttatgactgggtccgaatctctgaacggatgtgtggcggacctggctgatgttgatcgccgtcgacacacgcgccacatgggtcaatacacaagacagctatcagttgttttagtcgaaccggttaacacaattcttgcccccccgagaactcccgaaattcgtcaacagttacaccttctttcagcaagcccctggagttacttctcatctcactaggattccaactaccgaactttcttcacatcggatgtagggtgtaaggttcccaccttaacaccatttttttgtgcgcgtatatggttttcagcatgttcatgaaacggtctatcaaccgatctcgaaggcgacgcacggatgaaaatcaaagaaggcacggtttcatccgcaactaagaaggcctccgattttgagtacgaagccttggccgctgtgccacgtttcggcgggaaagggttattttgatattgtgctacctttctagtccggtacagttcttgaatttgtgtgtgaagcggttgtgtttccttcctcttcttatggaactggttgagaggctaggagcagcaagatgcttgggccgaggatgttaccgcttttgagttatcccagagtaggaagctaggtcccgttgacatatcgcaacgaaacggccacgctttcttcgtccttctattgccaaacggttgaaaggttactgcatgcggtcgcgtgtattatgcgtttggaaaatgtacggcgcaggttcctgtcacgattacagtacattgacatcttatgtaaggtgaatttcaccatctggtacggtgaccctcaaatagactccataattgtacagcacttgactatgtgcccatgaattgacttgggacttggaatctttgttgaatcaatgccgttagttgacgtggaacgtctagaagttgacgacggccaacgccaagaagcggacaattgtacttgcgcctatacggcgtaagagactccgaaaaggtgtggaaagttgccagtatatatttgtagtgtccgctaaatgaattcatatgaggcacaaggtgaagtgtaagttggtcccgatacctgcgggcggcccttatgaaaattgacgcacaccttaagagacatgggaaacagctcgtgttcatttgcctgttaaggctaacgcccctgtttaaggagttgccatgcgtaccccttgacactatgttgagttgtcactgcgacaccaatgctggctttcaagtttaggccaatggagccggcgaccttcaagtgtgcgttaattgaaggcgttggatggccacgcagtgatgccggaacgtcaccttaatacgtttgcgtgcccagtgacttgtctggattaaatactgcgaaaacgcaaagagtgtaacgcttcccctccgctactcgatgtgattcataacaggtgaaatgtcaggcgaatcacgctcatgattactcaatcttttaaccactgaatgccgtacagaagatgcgacagctatattaacattgtgcggcaagttccgttggttgttctgtctcatgcactgtcttgtaccgagaaacagtattcattgggttacttagtcgcctctttcgttggacgaccttgcactgtctgtggcaaccagctagggagactttgctcttacgcaactccttttactggcgcgtgaatttgctatttgacaacgaagcatttccttgaagaatgaaaaagccttatggagtttgaacacacacgcgccattgctggggtgtacaagacgtattgtatacgctggattctgatctcagttttcggctcggaaacgaggggaactgctgagacatgagtgacgccaagcaaaatctgcggccgccaccgcggtggagctccagcttttgttccctttagtgagggttaattgcgcgcttggcgtaatcatggtcatagctgtttcctgtgtgaaattgttatccgctcacaattccacacaacatacgagccggaagcataaagtgtaaagcctggggtgcctaatgagtgagctaactcacattaattgcgttgcgctcactgcccgctttccagtcgggaaacctgtcgtgccagctgcattaatgaatcggccaacgcgcggggagaggcggtttgcgtattgggcgctcttccgcttcctcgctcactgactcgctgcgctcggtcgttcggctgcggcgagcggtatcagctcactcaaaggcggtaatacggttatccacagaatcaggggataacgcaggaaagaa

SEQ ID NO: 68 - DNA, 34 bp, artificial sequence
  recombination site
ataacttcgtataggatactttatacgaagttat

SEQ ID NO: 69 - DNA, 4017 bp, artificial sequence
  fusion gene
ggatccactagttgactgccacgtgtagtatcctcgttgcaaacactttttaatgatgcctctaacacgcgtatggtgtgtcatagagtattcgttcgtcctctgtgagatcattaaaaagaatcaatgcttgcctatggtacacaactgtatctgaaacagcgctctccactgtatcgcattgcagggtattattcacaacacctcagttttttttgccacagattgcttgccagtcacttctgtagacacacgctcgagcaggcggtgcgaaacctcactgttcatttttctaatcaatcatgctccgtttttccgacaattgggggagttttgaacgctggcggaatacgtgttgctacgtttggacttgtgctgggaccacttcagcacgttaatcaggggaccgtcaagcagatccttgctctagatgtgcctatgagaaggaggaactttcatgtggtgcaacggggcgtttaagctgtatcaaaagcgtcacaggaagtgctgccaaacccggaatgcttacagtacttgacaccttgaaactgtgtatgtggtgaagcggcgacgagaaaccgagagtgcttttggcttgcgcttctgagtggtgaagtggaggagccttgagctttctaggccgtggtcgctctctcgtggctttctgattcaggctggatacagcactccgtcatcgtgcctgaacgggattctccatgatccacaacagacgaggatggcagtgcacgcttattggtatcataacgtctttttcgatgaaacactggatgacgctctcaaccgccgtctcaacctctgttagaacctcctgtcggtgtaccttccgcgctggagacgctgaacattctatatgcttacaatgtgaacaaggacatcaagaattgttggctagcaaatcgacgtagagtgcagaagtcactaacgttgtagttgtgatctccagcgatttcggagcatgttatgccgcaagagggggctgacacacatacaaacacgcgttcttaataaaaatgatcaatacactggttcactgtatgccttcgcacacgggggaacaacaccgagagacatcgtgcgtcagtacgttctgaaagtgttctaaggacacatttagtgtggtcggtctccagatctccgcaatgctcttgcactgcattattcgttactgcagaatgcctgattgttgattacggtcgagcgttggattgctgattacagtcgagcgctggaatgttgattactgtcgagctcttcgtgatgacagaagcgctagctgtccaggtgcttagggcaaaatgtgtcttgtgctcgttgcgacgtgggatggtgtgcgtcgcactgagacacgctgcttcatgcctgctacttccctgcggtactattggagcgcctcttgtgtctctcgtgcgtaaccacagtggcagtttaaaacaaaatctggttcgcactgtcaatccctcgaagcctggcaagctgaattcctgtctgctctttggcggtcaccattcagtgggattggccgagattattaattttgtgtgtgaaattgcatggctttgaaacaccacataccacacaacccatccgcgtctcaagactatccgatcaagcgcgtctcgggcgcgtgtgtgttttcgtagagcagtgtgtgtcactttcctattctgtgtgcagtgccacgaggtgacgaacctgccatttgtagtcgtgttgttgtaatcgtgtattatatatatatatatatatatggtgacaactcagattacggatacaacgcagcgtacattgttatgcgacgctcgctttcaaggccaccaacttaagccgggtggtcattgtctgcagactgattccaatttatctacactgtaggtctgggtgttgctttcagccaagcagacaaagccactttgtaaaccagcattcaacaatggtgacaacaaccacgccaacgccacccggtgcgccggcagtggtgcccatcttcgacgttgtctatcaactgaatccgcacgtgtttagaagtcgcttttccaggaggaatcgcgccaggcgtgttgcgagcagcaagtcacgctcgataattcggtggcttgggtatcttacggtgctcgctgccgtcattttgctaggagcgtatgcagtaaggcgtgtatcgcgcgatctgtccgactcagtgcgggaaacacgacgaggcaggagaattacaggcagcgtacctcccgggactacccgtccccgttcagagtcttgtactggcacacaagtggacggcggctgcggcgctgacacgtcaaccgatggaaagtctgagagtgaacagaccgaaaacggggaggactcacgcttttccacccggacccctattcatgtcactgcatcgacttccccattcgcgacgcgcaaggcggcggaagaacgctcttcgagtccgagagacagaaaagttccggagggtgcccaactccccacgtcgtcgacacctcatgcacaaagaaaggactcaggtagtgatagccggaacccatctacactcataccttcaccaggtaccaacacgtttaacatgaacttttatattatcggagcaggctcttcagcgctcgattttattttcccgcacactccggatgctcaggctacagtcgtctcccccccccgcagcgcggcggccgcaccaactgtcgaaacagttccaagggttcgcacttactcgacaccaacaacattaaccctaccaacggcaccagcgaccgccactagcaaccacatgcatgcctcagcgactccctcgccaccggaacgtcctcaaaacttccgtgggggactcatgcggcaaaacggcatggttgaggggacatcgttaacgactaccgaggctgggatgccagcgccgttacaaagccctcaacacattgagacggaggcgaggttaacgtactcaaatcatctcaagagcccgcatacaccagaaactccaactgtccactcaatagaccccgttgtcggcaccagtggccattccgtagcggtgggatcgcagtctccagccggtggacctcctacagatagccgcaccccagcggcactgacccccacaagttcttctttctcacatgcagattctcttgaaacctctgagcatccgcaaagtggaccgtcgcttcatccattaatctccgggatacaagatgccgtgcaaagccaacttccactatcacaacaggagactctccctgtggtagaaaatgcgactttcttcgggccgcaacagactccaccgtggatggacgaaactgcagctgctgcaattccactcgctccctcacaaccagggtcacgtacacaacccatctcgtctccgcatactctactttcccgtagcggcggtgtgtcagctgtgccaggaccacccagaacagaaaaccctcggcaaccacaagttccaggcgaaaactcttactactctgtaccaactgagcggacgatctctgatccaggtccccaaagggcgggtgcggctcaggctgatggtatcggggctggaggcccacgggacacacaatcagcggtaactccatacccgtacgacgtcccggactacgcgtaaaaacttaaaaacttaagctgcagatatcagatctccatgggaggtccacacgaaccaggacccgctcgattaattaatcaccgttgtgctcacttctcaaatcgacaaaggaaacacacttcgtgcagcatgtgccccattataaagaaactgagttgttccgctgtggcttgcaggtgtcacatccacaaaaaccggccgactctaaataggagtgtttcgcagcaagcagcgaaagtttatgactgggtccgaatctctgaacggatgtgtggcggacctggctgatgttgatcgccgtcgacacacgcgccacatgggtcaatacacaagacagctatcagttgttttagtcgaaccggttaacacaattcttgcccccccga

SEQ ID NO: 70 - DNA, 3601 bp, Toxoplasma gondii
ggatccactagttgactgccacgtgtagtatcctcgttgcaaacactttttaatgatgcctctaacacgcgtatggtgtgtcatagagtattcgttcgtcctctgtgagatcattaaaaagaatcaatgcttgcctatggtacacaactgtatctgaaacagcgctctccactgtatcgcattgcagggtattattcacaacacctcagttttttttgccacagattgcttgccagtcacttctgtagacacacgctcgagcaggcggtgcgaaacctcactgttcatttttctaatcaatcatgctccgtttttccgacaattgggggagttttgaacgctggcggaatacgtgttgctacgtttggacttgtgctgggaccacttcagcacgttaatcaggggaccgtcaagcagatccttgctctagatgtgcctatgagaaggaggaactttcatgtggtgcaacggggcgtttaagctgtatcaaaagcgtcacaggaagtgctgccaaacccggaatgcttacagtacttgacaccttgaaactgtgtatgtggtgaagcggcgacgagaaaccgagagtgcttttggcttgcgcttctgagtggtgaagtggaggagccttgagctttctaggccgtggtcgctctctcgtggctttctgattcaggctggatacagcactccgtcatcgtgcctgaacgggattctccatgatccacaacagacgaggatggcagtgcacgcttattggtatcataacgtctttttcgatgaaacactggatgacgctctcaaccgccgtctcaacctctgttagaacctcctgtcggtgtaccttccgcgctggagacgctgaacattctatatgcttacaatgtgaacaaggacatcaagaattgttggctagcaaatcgacgtagagtgcagaagtcactaacgttgtagttgtgatctccagcgatttcggagcatgttatgccgcaagagggggctgacacacatacaaacacgcgttcttaataaaaatgatcaatacactggttcactgtatgccttcgcacacgggggaacaacaccgagagacatcgtgcgtcagtacgttctgaaagtgttctaaggacacatttagtgtggtcggtctccagatctccgcaatgctcttgcactgcattattcgttactgcagaatgcctgattgttgattacggtcgagcgttggattgctgattacagtcgagcgctggaatgttgattactgtcgagctcttcgtgatgacagaagcgctagctgtccaggtgcttagggcaaaatgtgtcttgtgctcgttgcgacgtgggatggtgtgcgtcgcactgagacacgctgcttcatgcctgctacttccctgcggtactattggagcgcctcttgtgtctctcgtgcgtaaccacagtggcagtttaaaacaaaatctggttcgcactgtcaatccctcgaagcctggcaagctgaattcctgtctgctctttggcggtcaccattcagtgggattggccgagattattaattttgtgtgtgaaattgcatggctttgaaacaccacataccacacaacccatccgcgtctcaagactatccgatcaagcgcgtctcgggcgcgtgtgtgttttcgtagagcagtgtgtgtcactttcctattctgtgtgcagtgccacgaggtgacgaacctgccatttgtagtcgtgttgttgtaatcgtgtattatatatatatatatatatatggtgacaactcagattacggatacaacgcagcgtacattgttatgcgacgctcgctttcaaggccaccaacttaagccgggtggtcattgtctgcagactgattccaatttatctacactgtaggtctgggtgttgctttcagccaagcagacaaagccactttgtaaaccagcattcaacaatggtgacaacaaccacgccaacgccacccggtgcgccggcagtggtgcccatcttcgacgttgtctatcaactgaatccgcacgtgtttagaagtcgcttttccaggaggaatcgcgccaggcgtgttgcgagcagcaagtcacgctcgataattcggtggcttgggtatcttacggtgctcgctgccgtcattttgctaggagcgtatgcagtaaggcgtgtatcgcgcgatctgtccgactcagtgcgggaaacacgacgaggcaggagaattacaggcagcgtacctcccgggactacccgtccccgttcagagtcttgtactggcacacaagtggacggcggctgcggcgctgacacgtcaaccgatggaaagtctgagagtgaacagaccgaaaacggggaggactcacgcttttccacccggacccctattcatgtcactgcatcgacttccccattcgcgacgcgcaaggcggcggaagaacgctcttcgagtccgagagacagaaaagttccggagggtgcccaactccccacgtcgtcgacacctcatgcacaaagaaaggactcaggtagtgatagccggaacccatctacactcataccttcaccaggtaccaacacgtttaacatgaacttttatattatcggagcaggctcttcagcgctcgattttattttcccgcacactccggatgctcaggctacagtcgtctcccccccccgcagcgcggcggccgcaccaactgtcgaaacagttccaagggttcgcacttactcgacaccaacaacattaaccctaccaacggcaccagcgaccgccactagcaaccacatgcatgcctcagcgactccctcgccaccggaacgtcctcaaaacttccgtgggggactcatgcggcaaaacggcatggttgaggggacatcgttaacgactaccgaggctgggatgccagcgccgttacaaagccctcaacacattgagacggaggcgaggttaacgtactcaaatcatctcaagagcccgcatacaccagaaactccaactgtccactcaatagaccccgttgtcggcaccagtggccattccgtagcggtgggatcgcagtctccagccggtggacctcctacagatagccgcaccccagcggcactgacccccacaagttcttctttctcacatgcagattctcttgaaacctctgagcatccgcaaagtggaccgtcgcttcatccattaatctccgggatacaagatgccgtgcaaagccaacttccactatcacaacaggagactctccctgtggtagaaaatgcgactttcttcgggccgcaacagactccaccgtggatggacgaaactgcagctgctgcaattccactcgctccctcacaaccagggtcacgtacacaacccatctcgtctccgcatactctactttcccgtagcggcggtgtgtcagctgtgccaggaccacccagaacagaaaaccctcggcaaccacaagttccaggcgaaaactcttactactctgtaccaactgagcggacgatctctgatccaggtccccaaagggcgggtgcggctcaggctgatggtatcggggctggaggcccacgggacacacaatcagcggtaactcca

SEQ ID NO: 71 - DNA, 1951 bp, Toxoplasma gondii
ggatccactagttgactgccacgtgtagtatcctcgttgcaaacactttttaatgatgcctctaacacgcgtatggtgtgtcatagagtattcgttcgtcctctgtgagatcattaaaaagaatcaatgcttgcctatggtacacaactgtatctgaaacagcgctctccactgtatcgcattgcagggtattattcacaacacctcagttttttttgccacagattgcttgccagtcacttctgtagacacacgctcgagcaggcggtgcgaaacctcactgttcatttttctaatcaatcatgctccgtttttccgacaattgggggagttttgaacgctggcggaatacgtgttgctacgtttggacttgtgctgggaccacttcagcacgttaatcaggggaccgtcaagcagatccttgctctagatgtgcctatgagaaggaggaactttcatgtggtgcaacggggcgtttaagctgtatcaaaagcgtcacaggaagtgctgccaaacccggaatgcttacagtacttgacaccttgaaactgtgtatgtggtgaagcggcgacgagaaaccgagagtgcttttggcttgcgcttctgagtggtgaagtggaggagccttgagctttctaggccgtggtcgctctctcgtggctttctgattcaggctggatacagcactccgtcatcgtgcctgaacgggattctccatgatccacaacagacgaggatggcagtgcacgcttattggtatcataacgtctttttcgatgaaacactggatgacgctctcaaccgccgtctcaacctctgttagaacctcctgtcggtgtaccttccgcgctggagacgctgaacattctatatgcttacaatgtgaacaaggacatcaagaattgttggctagcaaatcgacgtagagtgcagaagtcactaacgttgtagttgtgatctccagcgatttcggagcatgttatgccgcaagagggggctgacacacatacaaacacgcgttcttaataaaaatgatcaatacactggttcactgtatgccttcgcacacgggggaacaacaccgagagacatcgtgcgtcagtacgttctgaaagtgttctaaggacacatttagtgtggtcggtctccagatctccgcaatgctcttgcactgcattattcgttactgcagaatgcctgattgttgattacggtcgagcgttggattgctgattacagtcgagcgctggaatgttgattactgtcgagctcttcgtgatgacagaagcgctagctgtccaggtgcttagggcaaaatgtgtcttgtgctcgttgcgacgtgggatggtgtgcgtcgcactgagacacgctgcttcatgcctgctacttccctgcggtactattggagcgcctcttgtgtctctcgtgcgtaaccacagtggcagtttaaaacaaaatctggttcgcactgtcaatccctcgaagcctggcaagctgaattcctgtctgctctttggcggtcaccattcagtgggattggccgagattattaattttgtgtgtgaaattgcatggctttgaaacaccacataccacacaacccatccgcgtctcaagactatccgatcaagcgcgtctcgggcgcgtgtgtgttttcgtagagcagtgtgtgtcactttcctattctgtgtgcagtgccacgaggtgacgaacctgccatttgtagtcgtgttgttgtaatcgtgtattatatatatatatatatatatggtgacaactcagattacggatacaacgcagcgtacattgttatgcgacgctcgctttcaaggccaccaacttaagccgggtggtcattgtctgcagactgattccaatttatctacactgtaggtctgggtgttgctttcagccaagcagacaaagccactttgtaaaccagcattcaaca

SEQ ID NO: 72 - DNA, 30 bp, artificial sequence
  tag
tacccgtacgacgtcccggactacgcgtaa

SEQ ID NO: 73 - DNA, 9443 bp, artificial sequence
  plasmid
gatctcgagctcgctaggaatgcattagaggtccacacgaaccaggacccgctcgattaattaatcaccgttgtgctcacttctcaaatcgacaaaggaaacacacttcgtgcagcatgtgccccattataaagaaactgagttgttccgttgtggcttgcaggtgtcacatccacagaaaccggccgactctaaataggagtgtttcgcagcaagcagcgaaagtttatgactgggtccgaatctctgaacggatgtgtggcggacctggctgatgttgatcgccgtcgacacacgcgccacatgggtcaatacacaagacagctatcagttgttctagtcgaaccggttaacacaattcttgcccccccgagggataacttcgtatagtataccttatacgaagttatgaactcccgaaattcgtcaacagttacaccttctttcagcaagcccctggagttacttctcatctcactaggattccaactaccgaactttcttcacatcggatgtagggtgtaaggttcccaccttaacaccatttttttgtgcgcgtatatggttttcagcatgttcatgaaacggtctatcaaccgatctcgaaggcgacgcacggatgaaaatcaaagaaggcacggtttcatccgcaactaagaaggcctccgattttgagtacgaagccttggccgctgtgccacgtttcggcgggaaagggttattttgatattgtgctacctttctagtccggtacagttcttgaatttgtgtgtgaagcggttgtgtttccttcctcttcttatggaactggttgagaggctaggagcagcaagatgcttgggccgaggatgttaccgcttttgagttatcccagagtaggaagctaggtcccgttgacatatcgcaacgaaacggccacgctttcttcgtccttctattgccaaacggttgaaaggttactgcatgcggtcgcgtgtattatgcgtttggaaaatgtacggcgcaggttcctgtcacgattacagtacattgacatcttatgtaaggtgaatttcaccatctggtacggtgaccctcaaatagactccataattgtacagcacttgactatgtgcccatgaattgacttgggacttggaatctttgttgaatcaatgccgttagttgacgtggaacgtctagaagttgacgacggccaacgccaagaagcggacaattgtacttgcgcctatacggcgtaagagactccgaaaaggtgtggaaagttgccagtatatatttgtagtgtccgctaaatgaattcatatgaggcacaaggtgaagtgtaagttggtcccgatacctgcgggcggcccttatgaaaattgacgcacaccttaagagacatgggaaacagctcgtgttcatttgcctgttaaggctaacgcccctgtttaaggagttgccatgcgtaccccttgacactatgttgagttgtcactgcgacaccaatgctggctttcaagtttaggccaatggagccggcgaccttcaagtgtgcgttaattgaaggcgttggatggccacgcagtgatgccggaacgtcaccttaatacgtttgcgtgcccagtgacttgtctggattaaatactgcgaaaacgcaaagagtgtaacgcttcccctccgctactcgatgtgattcataacaggtgaaatgtcaggcgaatcacgctcatgattactcaatcttttaaccactgaatgccgtacagaagatgcgacagctatattaacattgtgcggcaagttccgttggttgttctgtctcatgcactgtcttgtaccgagaaacagtattcattgggttacttagtcgcctctttcgttggacgaccttgcactgtctgtggcaaccagctagggagactttgctcttacgcaactccttttactggcgcgtgaatttgctatttgacaacgaagcatttccttgaagaatgaaaaagccttatggagtttgaacacacacgcgccattgctggggtgtacaagacgtattgtatacgctggattctgatctcagttttcggctcggaaacgaggggaactgctgagacatgagtgacgccaagcaaaatctgcggccgccaccgcggtggagctccagcttttgttccctttagtgagggttaattgcgcgcttggcgtaatcatggtcatagctgtttcctgtgtgaaattgttatccgctcacaattccacacaacatacgagccggaagcataaagtgtaaagcctggggtgcctaatgagtgagctaactcacattaattgcgttgcgctcactgcccgctttccagtcgggaaacctgtcgtgccagctgcattaatgaatcggccaacgcgcggggagaggcggtttgcgtattgggcgctcttccgcttcctcgctcactgactcgctgcgctcggtcgttcggctgcggcgagcggtatcagctcactcaaaggcggtaatacggttatccacagaatcaggggataacgcaggaaagaacatgtgagcaaaaggccagcaaaaggccaggaaccgtaaaaaggccgcgttgctggcgtttttccataggctccgcccccctgacgagcatcacaaaaatcgacgctcaagtcagaggtggcgaaacccgacaggactataaagataccaggcgtttccccctggaagctccctcgtgcgctctcctgttccgaccctgccgcttaccggatacctgtccgcctttctcccttcgggaagcgtggcgctttctcatagctcacgctgtaggtatctcagttcggtgtaggtcgttcgctccaagctgggctgtgtgcacgaaccccccgttcagcccgaccgctgcgccttatccggtaactatcgtcttgagtccaacccggtaagacacgacttatcgccactggcagcagccactggtaacaggattagcagagcgaggtatgtaggcggtgctacagagttcttgaagtggtggcctaactacggctacactagaaggacagtatttggtatctgcgctctgctgaagccagttaccttcggaaaaagagttggtagctcttgatccggcaaacaaaccaccgctggtagcggtggtttttttgtttgcaagcagcagattacgcgcagaaaaaaaggatctcaagaagatcctttgatcttttctacggggtctgacgctcagtggaacgaaaactcacgttaagggattttggtcatgagattatcaaaaaggatcttcacctagatccttttaaattaaaaatgaagttttaaatcaatctaaagtatatatgagtaaacttggtctgacagttaccaatgcttaatcagtgaggcacctatctcagcgatctgtctatttcgttcatccatagttgcctgactccccgtcgtgtagataactacgatacgggagggcttaccatctggccccagtgctgcaatgataccgcgagacccacgctcaccggctccagatttatcagcaataaaccagccagccggaagggccgagcgcagaagtggtcctgcaactttatccgcctccatccagtctattaattgttgccgggaagctagagtaagtagttcgccagttaatagtttgcgcaacgttgttgccattgctacaggcatcgtggtgtcacgctcgtcgtttggtatggcttcattcagctccggttcccaacgatcaaggcgagttacatgatcccccatgttgtgcaaaaaagcggttagctccttcggtcctccgatcgttgtcagaagtaagttggccgcagtgttatcactcatggttatggcagcactgcataattctcttactgtcatgccatccgtaagatgcttttctgtgactggtgagtactcaaccaagtcattctgagaatagtgtatgcggcgaccgagttgctcttgcccggcgtcaatacgggataataccgcgccacatagcagaactttaaaagtgctcatcattggaaaacgttcttcggggcgaaaactctcaaggatcttaccgctgttgagatccagttcgatgtaacccactcgtgcacccaactgatcttcagcatcttttactttcaccagcgtttctgggtgagcaaaaacaggaaggcaaaatgccgcaaaaaagggaataagggcgacacggaaatgttgaatactcatactcttcctttttcaatattattgaagcatttatcagggttattgtctcatgagcggatacatatttgaatgtatttagaaaaataaacaaataggggttccgcgcacatttccccgaaaagtgccacctgacgcgccctgtagcggcgcattaagcgcggcgggtgtggtggttacgcgcagcgtgaccgctacacttgccagcgccctagcgcccgctcctttcgctttcttcccttcctttctcgccacgttcgccggctttccccgtcaagctctaaatcgggggctccctttagggttccgatttagtgctttacggcacctcgaccccaaaaaacttgattagggtgatggttcacgtagtgggccatcgccctgatagacggtttttcgccctttgacgttggagtccacgttctttaatagtggactcttgttccaaactggaacaacactcaaccctatctcggtctattcttttgatttataagggattttgccgatttcggcctattggttaaaaaatgagctgatttaacaaaaatttaacgcgaattttaacaaaatattaacgcttacaatttccattcgccattcaggctgcgcaactgttgggaagggcgatcggtgcgggcctcttcgctattacgccagctggcgaaagggggatgtgctgcaaggcgattaagttgggtaacgccagggttttcccagtcacgacgttgtaaaacgacggccagtgagcgcgcgtaatacgactcactatagggcgaattgggtaccccagaaaccaggtgttgttcttattttaggattttccggctaaccgttgtgactcactgaaccaacctgatatgggtgataagattgatcgtggagtaccgtatgaaacaatatgcctcaactgtaaacgtctttatttaaccaatttaggattcgcgcgaccgcctaaaccgtaaaaggagatggtcgcaggcctgctcaacatccagcctgtgcatcggtgaaaatgaagtgcgccacacgcgtgcacatttccgtgccaggataggcgcgatagggagtgacctgaatccattaggtatcctcctatacggtgaggaagacagttgacaaaggacctggtcgacggacactttgacggatgaagctgaggaaatggcttgtcataaccgttcaattcgggtgcgaatcccactacttgctaacgcctggttcctcctcctccaagaggatagtcccaaaatgtcgactgttgctcgtagggtgcgtttgtgtatgcgagtttcctatacgtacgcgaggagttgtacgcccgtcataattgactgaaagagagcacatcccgtacccagagcagcggcttggatacctgtgagttggaggcaagatgttacagaggtgcaactacttcgacggaaccgtcgttttttctgattccttgcattctgtgttgcaacgagacttttgaaacagggaaaccttgatgaaagacacaatatttcagtgtagaaggaatccgctgcccggcgttctgtgttagctgccaggtcagcttcccccggaacattcttgactagagtcaaataaacatatcgattcttggagtgttgagttcccaatgccaagttgcaatggattgggtaggacgtaacctttctgttcaggaactagaggccgtggcgctctgactttgccttgcggacatgatgtcagattgtcttgcctggcgcacggccatatgtattccattggtctcattgatttgtcgataaatgtccgcctcgagcctgagacccatattcattgcagtttcctccatctctcctgtccagtgctgttagctagtttctttctcatgtgatgctgagtcttgcgagtctcaggtgtgacactggggcagccgtcacggtctaatggtctccgttaagactaagagacgttaccagttcacacgccgccaggagcgccgccggaccgatgtttctcgatttaatgaaatcagtttgaatctctgggtagaacagcaatagacagcaagtcttgcgtgaggacttacgttggatatgaaaagcagtaccatacccagagattttgtcctattcgggccgactccgctgaatttagtaccgtcagtggtaggccttttaatttgtgtacgtgaaagacatagagctgaaaacatcccagaacctcacttggagtcatcgctgcttcagtgttgggcagatccgtaccaaatagtagactcctctatattcaggcttttagtattcaacttcgcgcggccccggaaaacatcggtcctagtatgccgcgcgctatcatttgtgtggcatctgcaagacccgacgctaggacgaacgcgaggacaaagaaacgagacgcagcgtagttgtgtctgcttggacacgagcaggctgtgcgtcgtttcaaacattccgagcgagtctcgtgagcagtcaactaaaatgggaaacgaagcattaaatttatcaaacatacacgataccagcttcatggtgacagttctgatgctagcgctgtgttctagagtagcgagtggctagcggaagacagtaccagccacgttagcagtccagccctgaagtgtttgtcaatgcaccactggataacttcgtataggatactttatacgaagttattgatcaggaatcatcgtctcagcgggatgacgttgcggagcaggccggctcgcggtgggcagtcagatgccgaaggcgtaactcaggacggcttgcgctcatcgcagaacaggggtggtgcctgcattgggtgcggttggtgatcctggttggaccggtggagatgcgcgcgcacgaaggggatgtgtcagaaacattttgtttgttctctgtgaacttttagatgtgttaaaggcggcgaatattagcagagagtcctccttgttggattctctcttgaatttcgccctttccttctctttgcgagtctcgtagagaacaagcactcgttcgccgtccctgacgacgcaacccgcgcagaagacatccaccaaacggtgttacacaatcaccttgtgtgaagttcttgcggaaaactactcgttggcattttttcttgaattccctttttcgacaaaatgcatgagaaaaaaatcactggatataccaccgttgatatatcccaatcgcatcgtaaagaacattttgaggcatttcagtcagttgctcaatgtacctataaccagaccgttcagctggatattacggcctttttaaagaccgtaaagaaaaataagcacaagttttatccggcctttattcacattcttgcccgcctgatgaatgctcatccggaattccgtatggcaatgaaagacggtgagctggtgatatgggatagtgttcacccttgttacaccgttttccatgagcaaactgaaacgttttcatcgctctggagtgaataccacgacgatttccggcagtttctacacatatattcgcaagatgtggcgtgttacggtgaaaacctggcctatttccctaaagggtttattgagaatatgtttttcgtctcagccaatccctgggtgagtttcaccagttttgatttaaacgtggccaatatggacaacttcttcgcccccgttttcaccatgggcaaatattatacgcaaggcgacaaggtgctgatgccgctggcgattcaggttcatcatgccgtctgtgatggcttccatgtcggcagaatgcttaatgaattacaacagtactgcgatgagtggcagggcggggctcctaggatggtgagcaagggcgaggaggtcatcaaagagttcatgcgcttcaaggtgcgcatggagggctccatgaacggccacgagttcgagatcgagggcgagggcgagggccgcccctacgagggcacccagaccgccaagctgaaggtgaccaagggcggccccctgcccttcgcctgggacatcctgtccccccagttcatgtacggctccaaggcgtacgtgaagcaccccgccgacatccccgattacaagaagctgtccttccccgagggcttcaagtgggagcgcgtgatgaacttcgaggacggcggtctggtgaccgtgacccaggactcctccctgcaggacggcacgctgatctacaaggtgaagatgcgcggcaccaacttcccccccgacggccccgtaatgcagaagaagaccatgggctgggaggcctccaccgagcgcctgtacccccgcgacggcgtgctgaagggcgagatccaccaggccctgaagctgaaggacggcggccactacctggtggagttcaagaccatctacatggccaagaagcccgtgcaactgcccggctactactacgtggacaccaagctggacatcacctcccacaacgaggactacaccatcgtggaacagtacgagcgctccgagggccgccaccacctgttcctggggcatggcaccggcagcaccggcagcggcagctccggcaccgcctcctccgaggacaacaacatggccgtcatcaaagagttcatgcgcttcaaggtgcgcatggagggctccatgaacggccacgagttcgagatcgagggcgagggcgagggccgcccctacgagggcacccagaccgccaagctgaaggtgaccaagggcggccccctgcccttcgcctgggacatcctgtccccccagttcatgtacggctccaaggcgtacgtgaagcaccccgccgacatccccgattacaagaagctgtccttccccgagggcttcaagtgggagcgcgtgatgaacttcgaggacggcggtctggtgaccgtgacccaggactcctccctgcaggacggcacgctgatctacaaggtgaagatgcgcggcaccaacttcccccccgacggccccgtaatgcagaagaagaccatgggctgggaggcctccaccgagcgcctgtacccccgcgacggcgtgctgaagggcgagatccaccaggccctgaagctgaaggacggcggccactacctggtggagttcaagaccatctacatggccaagaagcccgtgcaactgcccggctactactacgtggacaccaagctggacatcacctcccacaacgaggactacaccatcgtggaacagtacgagcgctccgagggccgccaccacctgttcctgtacggcatggacgagctgtacaagtaatca

SEQ ID NO: 74 - DNA, 20 bp, artificial sequence
  primer
gtgatcctggttggaccggt

SEQ ID NO: 75 - DNA, 54 bp, artificial sequence
  primer
ataacttcgtataaagtatcctatacgaagttatcggttcgactagaacaactg

SEQ ID NO: 76 - DNA, 8108 bp, artificial sequence
  plasmid
ccccctcgaggtcgacggtatcgataagcttgatatgcatgtccgcgttcgtgaaattctctgatcaagcggagtgatcaccaatcatcgtctcagcgggatgacgttgcggcaagggccggctcgcggtgggcagtcagatgccgaacgtaactcaggacggcttgcgctcatcgcagaacaggggtggtgcctgcattgggtgcggttggtgatcctggttggaccggtggagatgcgcgcgcacgaaggggatgtgtcagaaacattttgtttgttctctgtgaacttttagatgtgttaaaggcggcgaatattagcagagagtcctccttgttccattctctcttgaatttcgccctttccttctctttgcgagtgtggtagagaacaagcactcgttcgccgtccctgacgacgcaacccgcgcagaagacatccaccaaacggtgttacacaatcaccttgtgtgaagttcttgcggaaaactactcgttggcattttttcttgaattccctttttcgacaaaatgcataagttgaccagtgccgttccggtgctcaccgcgcgcgacgtcgccggagcggtcgagttctggaccgaccggctcgggttctcccgggacttcgtggaggacgacttcgccggtgtggtccgggacgacgtgaccctgttcatcagcgcggtccaggaccaggtggtgccggacaacaccctggcctgggtgtgggtgcgcggcctggacgagctgtacgccgagtggtcggaggtcgtgtccacgaacttccgggacgcctccgggccggccatgaccgagatcggcgagcagccgtgggggcgggagttcgccctgcgcgacccggccggcaactgcgtgcacttcgtggccgaggagcaggattaattaatcaccgttgtgctcacttctcaaatcgacaaaggaaacacacttcgtgcagcatgtgccccattataaagaaactgagttgttccgttgtggcttgcaggtgtcacatccacagaaaccggccgactctaaataggagtgtttcgcagcaagcagcgaaagtttatgactgggtccgaatctctgaacggatgtgtggcggacctggctgatgttgatcgccgtcgacacacgcgccacatgggtcaatacacaagacagctatcagttgttctagtcgaaccggttaacacaattcttgcccccccgagggggatccactagttgactgccacgtgtagtatcctcgttgcaaacactttttaatgatgcctctaacacgcgtatggtgtgtcatagagtattcgttcgtcctctgtgagatcattaaaaagaatcaatgcttgcctatggtacacaactgtatctgaaacagcgctctccactgtatcgcattgcagggtattattcacaacacctcagttttttttgccacagattgcttgccagtcacttctgtagacacacgctcgagcaggcggtgcgaaacctcactgttcatttttctaatcaatcatgctccgtttttccgacaattgggggagttttgaacgctggcggaatacgtgttgctacgtttggacttgtgctgggaccacttcagcacgttaatcaggggaccgtcaagcagatccttgctctagatgtgcctatgagaaggaggaactttcatgtggtgcaacggggcgtttaagctgtatcaaaagcgtcacaggaagtgctgccaaacccggaatgcttacagtacttgacaccttgaaactgtgtatgtggtgaagcggcgacgagaaaccgagagtgcttttggcttgcgcttctgagtggtgaagtggaggagccttgagctttctaggccgtggtcgctctctcgtggctttctgattcaggctggatacagcactccgtcatcgtgcctgaacgggattctccatgatccacaacagacgaggatggcagtgcacgcttattggtatcataacgtctttttcgatgaaacactggatgacgctctcaaccgccgtctcaacctctgttagaacctcctgtcggtgtaccttccgcgctggagacgctgaacattctatatgcttacaatgtgaacaaggacatcaagaattgttggctagcaaatcgacgtagagtgcagaagtcactaacgttgtagttgtgatctccagcgatttcggagcatgttatgccgcaagagggggctgacacacatacaaacacgcgttcttaataaaaatgatcaatacactggttcactgtatgccttcgcacacgggggaacaacaccgagagacatcgtgcgtcagtacgttctgaaagtgttctaaggacacatttagtgtggtcggtctccagatctccgcaatgctcttgcactgcattattcgttactgcagaatgcctgattgttgattacggtcgagcgttggattgctgattacagtcgagcgctggaatgttgattactgtcgagctcttcgtgatgacagaagcgctagctgtccaggtgcttagggcaaaatgtgtcttgtgctcgttgcgacgtgggatggtgtgcgtcgcactgagacacgctgcttcatgcctgctacttccctgcggtactattggagcgcctcttgtgtctctcgtgcgtaaccacagtggcagtttaaaacaaaatctggttcgcactgtcaatccctcgaagcctggcaagctgaattcctgtctgctctttggcggtcaccattcagtgggattggccgagattattaattttgtgtgtgaaattgcatggctttgaaacaccacataccacacaacccatccgcgtctcaagactatccgatcaagcgcgtctcgggcgcgtgtgtgttttcgtagagcagtgtgtgtcactttcctattctgtgtgcagtgccacgaggtgacgaacctgccatttgtagtcgtgttgttgtaatcgtgtattatatatatatatatatatatggtgacaactcagattacggatacaacgcagcgtacattgttatgcgacgctcgctttcaaggccaccaacttaagccgggtggtcattgtctgcagactgattccaatttatctacactgtaggtctgggtgttgctttcagccaagcagacaaagccactttgtaaaccagcattcaacaatggtgacaacaaccacgccaacgccacccggtgcgccggcagtggtgcccatcttcgacgttgtctatcaactgaatccgcacgtgtttagaagtcgcttttccaggaggaatcgcgccaggcgtgttgcgagcagcaagtcacgctcgataattcggtggcttgggtatcttacggtgctcgctgccgtcattttgctaggagcgtatgcagtaaggcgtgtatcgcgcgatctgtccgactcagtgcgggaaacacgacgaggcaggagaattacaggcagcgtacctcccgggactacccgtccccgttcagagtcttgtactggcacacaagtggacggcggctgcggcgctgacacgtcaaccgatggaaagtctgagagtgaacagaccgaaaacggggaggactcacgcttttccacccggacccctattcatgtcactgcatcgacttccccattcgcgacgcgcaaggcggcggaagaacgctcttcgagtccgagagacagaaaagttccggagggtgcccaactccccacgtcgtcgacacctcatgcacaaagaaaggactcaggtagtgatagccggaacccatctacactcataccttcaccaggtaccaacacgtttaacatgaacttttatattatcggagcaggctcttcagcgctcgattttattttcccgcacactccggatgctcaggctacagtcgtctcccccccccgcagcgcggcggccgcaccaactgtcgaaacagttccaagggttcgcacttactcgacaccaacaacattaaccctaccaacggcaccagcgaccgccactagcaaccacatgcatgcctcagcgactccctcgccaccggaacgtcctcaaaacttccgtgggggactcatgcggcaaaacggcatggttgaggggacatcgttaacgactaccgaggctgggatgccagcgccgttacaaagccctcaacacattgagacggaggcgaggttaacgtactcaaatcatctcaagagcccgcatacaccagaaactccaactgtccactcaatagaccccgttgtcggcaccagtggccattccgtagcggtgggatcgcagtctccagccggtggacctcctacagatagccgcaccccagcggcactgacccccacaagttcttctttctcacatgcagattctcttgaaacctctgagcatccgcaaagtggaccgtcgcttcatccattaatctccgggatacaagatgccgtgcaaagccaacttccactatcacaacaggagactctccctgtggtagaaaatgcgactttcttcgggccgcaacagactccaccgtggatggacgaaactgcagctgctgcaattccactcgctccctcacaaccagggtcacgtacacaacccatctcgtctccgcatactctactttcccgtagcggcggtgtgtcagctgtgccaggaccacccagaacagaaaaccctcggcaaccacaagttccaggcgaaaactcttactactctgtaccaactgagcggacgatctctgatccaggtccccaaagggcgggtgcggctcaggctgatggtatcggggctggaggcccacgggacacacaatcagcggtaactccatacccgtacgacgtcccggactacgcgtaaaaacttaaaaacttaagctgcagatatcagatctccatgggaggtccacacgaaccaggacccgctcgattaattaatcaccgttgtgctcacttctcaaatcgacaaaggaaacacacttcgtgcagcatgtgccccattataaagaaactgagttgttccgctgtggcttgcaggtgtcacatccacaaaaaccggccgactctaaataggagtgtttcgcagcaagcagcgaaagtttatgactgggtccgaatctctgaacggatgtgtggcggacctggctgatgttgatcgccgtcgacacacgcgccacatgggtcaatacacaagacagctatcagttgttttagtcgaaccggttaacacaattcttgcccccccgagagctccagcttttgttccctttagtgagggttaattgcgcgcttggcgtaatcatggtcatagctgtttcctgtgtgaaattgttatccgctcacaattccacacaacatacgagccggaagcataaagtgtaaagcctggggtgcctaatgagtgagctaactcacattaattgcgttgcgctcactgcccgctttccagtcgggaaacctgtcgtgccagctgcattaatgaatcggccaacgcgcggggagaggcggtttgcgtattgggcgctcttccgcttcctcgctcactgactcgctgcgctcggtcgttcggctgcggcgagcggtatcagctcactcaaaggcggtaatacggttatccacagaatcaggggataacgcaggaaagaacatgtgagcaaaaggccagcaaaaggccaggaaccgtaaaaaggccgcgttgctggcgtttttccataggctccgcccccctgacgagcatcacaaaaatcgacgctcaagtcagaggtggcgaaacccgacaggactataaagataccaggcgtttccccctggaagctccctcgtgcgctctcctgttccgaccctgccgcttaccggatacctgtccgcctttctcccttcgggaagcgtggcgctttctcatagctcacgctgtaggtatctcagttcggtgtaggtcgttcgctccaagctgggctgtgtgcacgaaccccccgttcagcccgaccgctgcgccttatccggtaactatcgtcttgagtccaacccggtaagacacgacttatcgccactggcagcagccactggtaacaggattagcagagcgaggtatgtaggcggtgctacagagttcttgaagtggtggcctaactacggctacactagaaggacagtatttggtatctgcgctctgctgaagccagttaccttcggaaaaagagttggtagctcttgatccggcaaacaaaccaccgctggtagcggtggtttttttgtttgcaagcagcagattacgcgcagaaaaaaaggatctcaagaagatcctttgatcttttctacggggtctgacgctcagtggaacgaaaactcacgttaagggattttggtcatgagattatcaaaaaggatcttcacctagatccttttaaattaaaaatgaagttttaaatcaatctaaagtatatatgagtaaacttggtctgacagttaccaatgcttaatcagtgaggcacctatctcagcgatctgtctatttcgttcatccatagttgcctgactccccgtcgtgtagataactacgatacgggagggcttaccatctggccccagtgctgcaatgataccgcgagacccacgctcaccggctccagatttatcagcaataaaccagccagccggaagggccgagcgcagaagtggtcctgcaactttatccgcctccatccagtctattaattgttgccgggaagctagagtaagtagttcgccagttaatagtttgcgcaacgttgttgccattgctacaggcatcgtggtgtcacgctcgtcgtttggtatggcttcattcagctccggttcccaacgatcaaggcgagttacatgatcccccatgttgtgcaaaaaagcggttagctccttcggtcctccgatcgttgtcagaagtaagttggccgcagtgttatcactcatggttatggcagcactgcataattctcttactgtcatgccatccgtaagatgcttttctgtgactggtgagtactcaaccaagtcattctgagaatagtgtatgcggcgaccgagttgctcttgcccggcgtcaatacgggataataccgcgccacatagcagaactttaaaagtgctcatcattggaaaacgttcttcggggcgaaaactctcaaggatcttaccgctgttgagatccagttcgatgtaacccactcgtgcacccaactgatcttcagcatcttttactttcaccagcgtttctgggtgagcaaaaacaggaaggcaaaatgccgcaaaaaagggaataagggcgacacggaaatgttgaatactcatactcttcctttttcaatattattgaagcatttatcagggttattgtctcatgagcggatacatatttgaatgtatttagaaaaataaacaaataggggttccgcgcacatttccccgaaaagtgccacctgacgcgccctgtagcggcgcattaagcgcggcgggtgtggtggttacgcgcagcgtgaccgctacacttgccagcgccctagcgcccgctcctttcgctttcttcccttcctttctcgccacgttcgccggctttccccgtcaagctctaaatcgggggctccctttagggttccgatttagtgctttacggcacctcgaccccaaaaaacttgattagggtgatggttcacgtagtgggccatcgccctgatagacggtttttcgccctttgacgttggagtccacgttctttaatagtggactcttgttccaaactggaacaacactcaaccctatctcggtctattcttttgatttataagggattttgccgatttcggcctattggttaaaaaatgagctgatttaacaaaaatttaacgcgaattttaacaaaatattaacgcttacaatttccattcgccattcaggctgcgcaactgttgggaagggcgatcggtgcgggcctcttcgctattacgccagctggcgaaagggggatgtgctgcaaggcgattaagttgggtaacgccagggttttcccagtcacgacgttgtaaaacgacggccagtgagcgcgcgtaatacgactcactatagggcgaattgggtaccgggcc

SEQ ID NO: 77 - DNA, 36 bp, artificial sequence
  primer
ctttatacgaagttatggatccactagttgactgcc

SEQ ID NO: 78 - DNA, 18 bp, artificial sequence
  primer
gtcaccattgttgaatgc

SEQ ID NO: 79 - DNA, 2092 bp, artificial sequence
  fusion gene
gcattcaacaatggtgacaacaaccacgccaacgccacccggtgcgccggcagtggtgcccatcttcgacgttgtctatcaactgaatccgcacgtgtttagaagtcgcttttccaggaggaatcgcgccaggcgtgttgcgagcagcaagtcacgctcgataattcggtggcttgggtatcttacggtgctcgctgccgtcattttgctaggagcgtatgcagtaaggcgtgtatcgcgcgatctgtccgactcagtgcgggaaacacgacgaggcaggagaattacaggcagcgtacctcccgggactacccgtccccgttcagagtcttgtactggcacacaagtggacggcggctgcggcgctgacacgtcaaccgatggaaagtctgagagtgaacagaccgaaaacggggaggactcacgcttttccacccggacccctattcatgtcactgcatcgacttccccattcgcgacgcgcaaggcggcggaagaacgctcttcgagtccgagagacagaaaagttccggagggtgcccaactccccacgtcgtcgacacctcatgcacaaagaaaggactcaggtagtgatagccggaacccatctacactcataccttcaccaggtaccaacacgtttaacatgaacttttatattatcggagcaggctcttcagcgctcgattttattttcccgcacactccggatgctcaggctacagtcgtctcccccccccgcagcgcggcggccgcaccaactgtcgaaacagttccaagggttcgcacttactcgacaccaacaacattaaccctaccaacggcaccagcgaccgccactagcaaccacatgcatgcctcagcgactccctcgccaccggaacgtcctcaaaacttccgtgggggactcatgcggcaaaacggcatggttgaggggacatcgttaacgactaccgaggctgggatgccagcgccgttacaaagccctcaacacattgagacggaggcgaggttaacgtactcaaatcatctcaagagcccgcatacaccagaaactccaactgtccactcaatagaccccgttgtcggcaccagtggccattccgtagcggtgggatcgcagtctccagccggtggacctcctacagatagccgcaccccagcggcactgacccccacaagttcttctttctcacatgcagattctcttgaaacctctgagcatccgcaaagtggaccgtcgcttcatccattaatctccgggatacaagatgccgtgcaaagccaacttccactatcacaacaggagactctccctgtggtagaaaatgcgactttcttcgggccgcaacagactccaccgtggatggacgaaactgcagctgctgcaattccactcgctccctcacaaccagggtcacgtacacaacccatctcgtctccgcatactctactttcccgtagcggcggtgtgtcagctgtgccaggaccacccagaacagaaaaccctcggcaaccacaagttccaggcgaaaactcttactactctgtaccaactgagcggacgatctctgatccaggtccccaaagggcgggtgcggctcaggctgatggtatcggggctggaggcccacgggacacacaatcagcggtaactccatacccgtacgacgtcccggactacgcgtaaaaacttaaaaacttaagctgcagatatcagatctccatgggaggtccacacgaaccaggacccgctcgattaattaatcaccgttgtgctcacttctcaaatcgacaaaggaaacacacttcgtgcagcatgtgccccattataaagaaactgagttgttccgctgtggcttgcaggtgtcacatccacaaaaaccggccgactctaaataggagtgtttcgcagcaagcagcgaaagtttatgactgggtccgaatctctgaacggatgtgtggcggacctggctgatgttgatcgccgtcgacacacgcgccacatgggtcaatacacaagacagctatcagttgttttagtcgaaccggttaacacaattcttgcccccccgagaactcccgaaattcg

SEQ ID NO: 80 - DNA, 572 bp, Toxoplasma gondii
gaactcccgaaattcgtcaacagttacaccttctttcagcaagcccctggagttacttctcatctcactaggattccaactaccgaactttcttcacatcggatgtagggtgtaaggttcccaccttaacaccatttttttgtgcgcgtatatggttttcagcatgttcatgaaacggtctatcaaccgatctcgaaggcgacgcacggatgaaaatcaaagaaggcacggtttcatccgcaactaagaaggcctccgattttgagtacgaagccttggccgctgtgccacgtttcggcgggaaagggttattttgatattgtgctacctttctagtccggtacagttcttgaatttgtgtgtgaagcggttgtgtttccttcctcttcttatggaactggttgagaggctaggagcagcaagatgcttgggccgaggatgttaccgcttttgagttatcccagagtaggaagctaggtcccgttgacatatcgcaacgaaacggccacgctttcttcgtccttctattgccaaacggttgaaaggttactgcatgcggtcgcgtgtattat

SEQ ID NO: 81 - DNA, 20 bp, artificial sequence
  primer
gaactcccgaaattcgtcaa

SEQ ID NO: 82 - DNA, 19 bp, artificial sequence
  primer
aatacacgcgaccgcatgc

SEQ ID NO: 83 - DNA, 20 bp, artificial sequence
  primer
gtttgaggaagcgcaaaaag

SEQ ID NO: 84 - DNA, 20 bp, artificial sequence
  primer
tgctgtgatttcgcaagttc

SEQ ID NO: 85 - DNA, 20 bp, artificial sequence
  primer
accccctgaccccttgtctg

SEQ ID NO: 86 - DNA, 20 bp, artificial sequence
  primer
tcgtcgtggtattcactcca

SEQ ID NO: 87 - DNA, 20 bp, artificial sequence
  primer
cacgtacacaacccatctcg

SEQ ID NO: 88 - DNA, 20 bp, artificial sequence
  primer
aaaacgaatgcgaaggaaga

SEQ ID NO: 89 - DNA, 20 bp, artificial sequence
  primer
cagtaccagccacgttagca

SEQ ID NO: 90 - DNA, 20 bp, artificial sequence
  primer
caagcaatctgtggcaaaaa

SEQ ID NO: 91 - DNA, 7170 bp, artificial sequence
  theoretical sequence
cagctgggctcgcaccaagcaaggcagttagtggtcccgccggaggttcaacagccctcccgtcgccgagcaagttagcaagtcctccaccaaaggacggcgagaagccaagtgacgtggcaaaaaaggctgccgtagcgtctcctccaaaggcagaaggagcagcagctgcagggagtgtaaatgccgctggtggagtcaaggcagcgaagggcccacctctagccaaaaagggccccggtcctcttggggtgaaaggaggagctcccttgcctcgtccgggggaaacaaaggaagaagcgtcatccgagtctgccactgccaaggttgctgcggatcttcctaaggggactccagtggcttcaaaaagcgctgtccctggcaaggccgcaccgctcggaccggggaaagagccccccgcaccgggagggaagacagcccctggggctcctgtgggcgggccaaaggcagaagtaaagaaggttcctccagttggcggaccaaagacagaagtaaagaaggatcctccggttggcggaccaaaggcagaagtaaagaaggttcctccggttggcggaccaaaggcagaagtaaagaaggttcctccggttggcggaccaaaggcagaagtaaagaaggttcctccggttggcggaccaaaggcagaagtgaagaaggttcctccggttggcggaccaaaggcagaagtgaagaagattcctcctggcgggcctctaggcgcaccgaaagctgacggcagcccccaagcggcacaggacggcgggactctaccgaaggccaagctcgggccaccaccagggttaggaaaagtgctgactagtgaagctgctgagagtataaaagaaacaggcccagcaaagaaaagcgctttgcccggaaaaggagtgccgccactggggaagaaggggccgccactggctgcaaaggtagaagagaaaggtggagattcaccgccagctgccgcgaaggcttcgtcaagttcggtggaccaagctgcggatcagaacgaaggagcgggagtagcaggtacacccgtaaaaaaaggaccgcctctcgggaaaggtccgccacccaaaaaagcgcccttggtggggaagaaggctcctacggctcctgaggcaccagacgccaaggtaaggtcgatcagtgagctggacaccggagcagcacgtctgaccaggctgacacatcaacgtaagttccggaagtttgtaaagaagaggcggctgacaagcatagagttcataccagtacacgagaatgcacagcgccgccttatattcgtcgggggggtcgtcctaggtccgcattgcccgctgtgcaaagccaattattatctaaatcgtttgttggttgtgtcgttgtgcggtgttgttgaccaggctgacgacgcgccaggaacggcggcgaaaaaagggccgcctaaaggcctccctcccaaaggaaaagcgccccctaagggtacgttggctagagacctgttgatgatattatcggaggatgcttgctacaagcatcggtgatatttgctttcattctcgtttagcagcacactgacagctccatggcatgcacggaggttggacagcagctgctgtcggactgggcagaaaacggggtcggttttcggtcatagagcttgcacttgttcttcgccacacgcgttgattgtagggggtacagtaaaccatgcgtagagtgctgaaaagggcgtttcaaaggtcacctagtttgcagctcgttagccggcatacgccaccaggaagttccgatattttcctctttctcttgtttgtgtccaggcaaaggatttctgtgagataccgtcgacccatgttgcaaccggcactactctagacaaataaatctgatctggtggcaagagcaggtgctacccgcaacagacgcgcatttcttctggttgctggtctgccgtgctgtgcatatagagcaaaagcacacccagcaatttgtttgttccggaatgaagctacatgagtgtatgtctgaggatcgttgtgttaacgaattcttacgggaaacaccagtagtgcccgtgttaattctccagtaaaacactacgtttcaaactctacccctcttacgcggtggcgccgttcgcccacctcccctcccgcgggagagacaacgctcggtgtccgcccgtcgctgcgagttctctgattgccttctagcgcaatagccagagcgctagaaagactgaaacaagagaagccgtctacaaacactgtagtgattgccttcgtccagaagcctcactcacattacagacctaggcagctcatcgtggcacctagcgttaagcaccgcttacataacaatgttgcacgaaccgctttgattctgtagcataactgccagcattcaaaatggtacttctaacgaccgattaccgacaaccgctcacacagcgaaaggctgccggtactctcggaatggacgcgcgcactgaagtctattattcacgtcgtgactaccatcgacgatccttgactctttccgcccgtccactgggccgtgtggttgaagcgacgtcactcagcttgaatgtgtagtagccggccgcctgactgtaaaatacacttgtattctacagtgtcaccatgctacgaacgttgtcgtacatcacttgctgcgttcgcatcctcacgtaactcaatggaacgtacgacgaattacgtataaaatcggacagaatgcaccataacacagttttcttcactgagacagaaacatctgaccacttaacatgacttcaggcgacatactgcattggatctaggctagaatctcaggctagaaaatacagacccgagaaatatggacggacgggaaggcaaaaaaaaaactaaaaaaaactaaggatgggaccctcgcgcatgcccgacttgcaggtgttgcgcttcttttcttgcgtgatcaaagcttataacttcgtataatgtatgctatacgaagttatggatcccatttgtagatacggttgcacacactagtctttgagggacagactccgatcctgcggtggtatgcgtgggttcgaaccgcgattgtggcaccagcaaaacttttaccgagcgaaaactgagcgattctacaaacaatatgggctcattcctattttttttcctgttatcacaatgccagaggccgtcataagaactgcttcatcattctcacacgtggccttcactgtggctcaaaatgaattttatccattgtttaaaaactgaagctgctttcaaccggaacacggcgtgaaaaatttttttgtttctcggactacacgttcactcatatatgccactggcgtttttacttcgacgttgttgcctttacggcagaattcacagttcaccgaacccggaaatggctttcgaatactctagggtagtaaagatcgttcgaagagtcgtcgggcttggggtgacaaggtttctaaacagagttggtttagacgcgtgttgattgccacgggcagggagcaactgcctctacggtttcgtggctcttgtggtactagataaacgcctgacagaaaaactgcggttgtgtggcatgcggcacggcgggattggccttgccgaagtaacgaggggaagagtcgaagacggtcgcagaaggtggaggcatcaaaaacggtgaaaagtgtgtttgccgggaccgccgtcaaaggagagtgtaccgtttgtactggtgccgtatgaactgaaacccgagcaatcctcctattaatgcattccaaattttgagttacgataacgggccttcggcacactatggctgcgatctcactatacagtgccgagagactctcacatgttctataactcgaagtagcacgccagcatctacaaacggatgtcgatagtgtcaccagagctctggctatcgggacaaaaagttttgcttctagtggcttgttgaaccgtcttcatcattgatgatggataccgtaggtacaacaagtgccacatagtagctgctggtagttgatgccgaggaacgtgagcacgtctttcttggactctactgctgaggccactgctgatgaggtgcctgtgtatgggggaagtgtaacgcacaccgttctggcaattgcgcttgaatccacacttgaacaaccatttctgcatgcgccgtgccgcatttggcacacctgcgtagtcccttggggtacttacgacaattttagattacacacatgttgacgagcaagcgtatctccgcgagcccaccgcatggcagtgaattcgctcggcgaaagtcgcagtcgcagatacgatttttttttgttccccccagtgcggtggaaatcgtggctggtgggcgcctgcgcggcgcatgcacaccgtggaaccgcaagacattctgcaggtttcccacccgttgtcttcctctcccttcaccgccgtaatcttgcgcacacgctggccgttgacggtcgaatggagctcgcgtgatcagaagatgtgtcccagatttcttgacctggcggaatgagacgcgaaagtcgagaagagtgacctcgcaaattcagcgggctggtaaacttcagggggtgcggcgataaaaccacttacagccagtggttgcccagcaatctgacctgtccgtcactgcacttcaccgaactgaggtccccaggaagtatagttcgtttcattttctgagcggtgctgtactcaaactgactccgggaactcactttctactgtgtgttagagctgatcagtgttctgtgaccatggcaatcggacgcggcggacaggattctcgtgcgctcaacccgagaatccttttgatatcatcatggaaaagatgcacccgcccagatgaggaaacagaagaagcagagccaccactacttctcgaggatgttcgagtcaagtctgggcatctcccaacgcgctgcgagccagctaatcagcaactgctcgagatcttgcttcctcatccgtcccaaccgagcattgttgtagcatttttatgggcgaactcaacactatatgaactgaatcagttcactcgtgacatggggctgacatcggttctcctgaggtcacctgaattcgtcttggggaacggttcgcttttggcagcgacaccttttgaccctctgtttattttcctcgctctgcttcatcgccacgccgccgagttctttgtccctttctcgcagctgatttcccagtgtgagtattctcacgaggttcgcaggaacctcgcgtggctggcgtccgcgccagcagtgacgcagcgaatctccctcgttgctgacgtccgctgcgccgacagttcgaccgttgatggcccgaccctggggggagaggcagtttctacgtcgctaggcgtgcaaccaattccagagttctgccgtctgaatgtcgacaaggcgcttgcttttcttcaccggaaacacgcaaagatgctgaataccattctacgtctacgccttccattcaaggactgcgtcatccttggcgagagctcgcagtacaatccaccaccgaagggaagtgatagcggatctgcttcaaccgacacacggacccgtacacgcccactccctgcgaatggccgcctgaatccacatagagatactgtgtctccaaacgatgtgacggacaagtgcgaaatcgacatttctgctgcgagccgcctagcggaagaaatcttaagtggatatcttcccaaaggcctcgcaaccgctttgaagcaacaatgtgacaggcggaggacctcgcgaaccactaaaactgggggaagcaggagcgaaatcagctgcacacgtgcaaatgctgcagacgatagcaaactacaggacggcaccacctcgatatgtggctcaggacgcctgtttccgggtactgaagttctaagtgggagacgcccagcattttcagacgcctctgccggtcgggagaaatctctcggcgggctcctcgatggcagcgcaggtggagcgaaggaaacggagaggcccccagagagttctggaccacctgaaaggacagcggagttccccgcgggcagcaggaagcggctgcgtgctggaacttctccacgacattctgcgtacaatagctccaccgggaagagtgaatccgatacgaaggagaatctgtcgcggcaagcggaagaaagaccagacgcactgcagagtgacgagcgaggagcaacgcgcaatactgaacatagacaagctgcggaggccggaaacacgacaacttcctccaatagaaaacgtaggaaggaagacttgccgcgtcacggctcctcctctctgagaagccatgcaggaggtttggaggcggaaaatgcgctgtcgatgacaaaaaccaagggcgctaccaaagtgccaaaccaaacgttaatcagttcattcttcaggaagaaacgatgaatacgaaaatagtcaagcgaaatgtttctggcaagaatcagtatgcggattagtgaggtggtaaaaagagtgaacgcagaagctgaggaacgtgccgctctggcaggatgacgtgggcgagcatcctcctcgactggtgcctgtccaggcatgtcaaaagtggatgctcatgttatgttacacatgaggagaaccgtgtgccttgcctacgctactgcgtcattgtgctgtacgtgtagtcattgggtctccggtttgtatctagatgatgctgccatcagtgacgcttgctgttcggtaggtggtcggtaaacttgttcgtgtaggaagggaagcatcaaggtataaataggatccttgaatacgaacgtggagtagaggaggaaccgcagcaactcttggtgtgtgacgagcgtttatgttttttccaaattgcaactgcacaacgtagcagggttctgtttctgtcgaggtcatcaatggtgcaggagactgatggtagaggctttggggttgagcgtgacacgtcgcttgttttacgcgcgctaggtaaaatagatttcggctgattttacttttacatggaaaaaaaaccgcactgcggatattggacccctggagagggagaaacaagcgcgttctcatctgcacacctcatctataacgaaatgtgtcgttgcactcgtaaaccttgtggatgttgacttctgtccgccgtagag

SEQ ID NO: 92 - DNA, 5863 bp, artificial sequence
  theoretical sequence
taatggtgttatgtttttcgttgtcgtgtttcacagctgacaggtggtactctactccgatgcagcttcggttgcgtgcgattgcgctggaggatccgactattattaagcctactatggcagaagcggccttatatggtcttgagagggaaaagatcgccaatacgctcagtacgtctaacagtgtgactttaaacgctgcctgaaaggacttaccccttggtatgcgctgtacattagttgagtaaggctagtacatagtgctagtttttccataaggccggttcatcctgtcatcttgagcgaattggttacagcagttgaggtagccgtgacattttccatctgctccacaaacggcagcactaccgtgcgatgacgtggcttctctatcatgtgtttgacgactttggtgacagttccagatgcagacctgccgaacttaccgtctccccacgctcccgaagaggatcttgaccttacgttgagaatcagtctgtcccctgctgacatcgctgtctgcgaaaacaatggaggaatagcctctagtgctaaagcgggggcctctacggggacacctggcatgcccactcctggtagcaaggttggacaagctaaagaaactagtgcctcttctaaagtgggcatggccaaaacagttccttccccactttcgaagaccgctcctcctttaaaagcagatccaagtgagcccgtaccaaccaaggtaggcggaggttctgtcggaggacctaaagccaccccatcgccgagcaaagcaggtcctccgccaaaggacagtgacaagccgggcggcgtggcaaaaaaagcgagcccaacgccaccttcaaaggcagaaggagtagcagcttcaggaagtggagacgcccctgaggaacccaaatcagtgaaaggcgcaccactaggcaaaaagggcccgggccctctcggagtgaagggcggctctcccttaccccctccgggagatgccaagggtaaagcatcacctgaatctgccaccgccaaaggtcctgcggagcttccgaaggggcctgcgggggctgcaaaggctgcagtccctggcaaagccgcgccggtcggaccgggaaaagggcccgcggccccattagggaagaaggctcctggggaacctgtgggcaagccgaaagcagagatgaagaagagttctccaccagtgggagagccgaaggctgaagtgaagaagagccctcccccaccatcaggcagcccaaaagccgaatcgaagaagagtccctctccaccactgggcgagccgaaggcagatgtaaagaagagccctcctccaccactgggtggacctaaggcagaaatgaagaaaagtcctcccggggcgtctccagcagcaccaaaggctgacagcagcactcccgcggcaccgaccggcgccactccgccgaaggccaaactcggagcgccgccaggcaaggcgccgactgctggaactgctgagggcaaagaagcggccccagcgaagaaaggtccgttgcccgcaaaaggagcggagccactaggcaagaagggacctccaccggttgcaaaggcagaagacacaacgaaaccgccgccgccaactgcgggtcagaatgatgatgcggacggtgcaggtgtatctgccaaaaaacaatcacctctcgggaagggtccgccgccgaaaaaagggcccctgctgggaaagaagattcctccggctccggacgcacgagacgcgaaagtgaggccagtcagcgatttggacacccacacagctagcctgaccaggctgacacatcaagagatgttctaaaagatttctgaaagagggaactgggaaacgtgggattcaaccagtacactagagtgatgcttttcacaggacatttctcagggggttttacgacgtttttgctctctgctcaacgtcaaatttaacgtcagtccgcgttttggttgtgtccctccgcggtgctggtgaccaggctgacgacgcttcaccggcgaaaaaagggccacccaaaggtctccccaaaggaaaagcaccccctaagggtacgttgacaagacaaaagtatatggttaccactcgcttcttttctttagtggcactcacacttcaatacggcatgcatggaagtttaccagcgggtgatgccaaagatgcagaaaacagagacggcttttcttcgttgtatgtgcgcaagttcttcgctccccgttgtcactgtaattgcttcactgcacattagtagctcgctttatgtgcgattcacatagtcaactagttgcggcaggttgactggtaagcagcagcagccagttccgagttttacttctttctcttatttgcgtccaggcaaaggatttctttgagacgtggtcaaccccatgttgcaaccggcagtgccgcaaacaaatatgtctactctggtggcaagagacagatctactggcactcgccgatcgttccatctgggtggtggtacgcctatctgtcgatttccagcaaagacattcccagcgagctccttgttcgtgcatgaacctacatagtatgtggcttcgcatcttcctacaaacgactgtctacagggaaaatatgagcgcccgagtcatttttcgagtaaacaccagaacaaactcccctcgtgccccggcgcggttgcccccagtccctgtgtcgcgagagaagcgtccgtcactgcacctttgcagactcccgtctagcaagacctcaaatgcgctaaaaaagctcaacaagggtagccatgtacaaactctgcagttatttattgccttctaccagaagtcccatgttgcagatctctccaaaaatgtgatcgcggcatctcgtatcaaataacttttacatagagatgttgttgtaccaccaagcttgagcttgacccggctatagaatttacctgcatcgatgaagcttataacttcgtatagtataccttatacgaagttatggatctagaaggctctgaaaaatgttgaaaacgcatgtgtactaggttattttcgccgacttccggtggctcctccacttggttggttcactcactgtagtgcactgtaagtaagtttcgagatcaggtgaggtggaacgggaccgtctcgattgtcaaatcctacagtacttagaacagtgatttttcagatactactgcacgcagtcgtctaccagactccgattctttatagcgcgcattagtaaacggtgttttggtagccgtaaagatgtgcagtgacggaagaaaacgtcatttccacggatgacgtgaggtagagcagttccgacactagatggggacactcccggtaaacagtatcacaggtcgccgcaaaccgtgcaccttctctcttttaagctgtgacctttactcggattcaaattaattgtcttcgttttctcaaaaaacccgaagctgcaccaccggaaaacactttgaacgaaggtacccctttttctttctgtgaatacggtttcggggatttttcgacccaccgttcaagggcggacaattactgagcagcaccgacacggcctccttttttagtcaccatgtatcagagaaaaagtgactgaaggtacagctggtgagcaccactacattccgatacaaaggggtgaatgagacggcgtggcaaaattgactgtcttttatctcctgctctgtattgctttcgtttagtaatccccgtcttccactgaacgatcagtctgtactccggtggttgacacgctaatatgtgacgctggctgcttactagaaatcgcgtgttcttcagtgaaatgacctgaaacttttcattaggagtctgctttcatcgttacgcgttctagcgagtgagcctgcacaacgtccacatagtgcaggtgtggaggtggttcagtacgcgccagcagtacacatgcgaaaaaccatcggaaatattatcagaaaccggtatcactgactccctgtcgcatctgtgaccatctgactgttctgccgtaatcaaaggcggtgaaatttgatgtctcacttcaaaaacaacgacgccaggacagaaacaccaccacaggcacacagtacattttgagaggggacaccttttttgccaagaagaccgaggcgaagttccgagaacagaaatgctcactatctgtgcgcgcttatcctaaatgagttcacgacatctataaattcagatcgtttcgacgaatattaagctccctaagcaagcagaatctgccttaacgcttatcgtaggccttctgacaatcgataaacgctggtcacaacaacacgatcatctacaactattgcgctctaaattgaaatggtcaagtgcctttacttcacggaggttgtgatcacaattccaagagattctcacgtgttccttgacattaaatggcgcagccagaagctatacacggcttcgatatactttttttatcaccggcctccgtctctcgggccaaggcgcttgtcgcggctttttgaacggcctcgatttgttttatcgtggggatgcgtaagtgcggccactgtcagcgaatcgctgctgaatgttgacggcgataagcgtgagcaactcttctcctgactcttctctgaaaccactgctgatcaaagcttagtgttttcaagaatgatacggcgcaacctcggccgatttcgccacgacactgtgaactaccattgacgcttccgccgtctcgcatttagcaccgctgtctaccacatagagtaattacggcaattgtagcgcgcacgcattgagatgagaggacgtatctccaccaacccatcacgtgcgaaacaaatttgctttgcaaatattcacacttgtagataccgattgtccgtcacggggaaagtcgtagcgagggggcagcgaaccggtgcatgcacactcctcactggaggaccgcaagacaaaccccaggtttttccacagtttctttttcttgcgtcaccacagtgatattgcacacgcactttctgaactcgtgttgaccagaacagtttcacaaatgtcgacgtctagcggagtgttacgtgaatgctgagagacttgtccgacaaatttgacgtgttggtgcttttcggggtgcggtggtaaagccgtttgcagccggtgattgccctgcagttgcatatgcccgtcaccacacttcatcagactaatgccactaggtagcgttgcctgttaccttttctgagtcgcactgtgtacgaactgaccccgggaactgtgtgtctactgtatgccgtcattggtggcggttccgtaactatggcaatagaaagcggaggactgggtcctcggactctgatcccgagaattcttctgatatcatcatggcaaagaggtgcccaaccagacgagggaacgaaggaaacagaaccacaactcgttcaaggagatgctccaggcagctctgggaatctgtcctccccgcagtggaagccagctaatcaccagctgcttgagattttgctccctcatccgtcccaaccgagcgtagttgtagcctttttatggtcaaactccacattgtatgaactgaatcagtttactcgtgacgtgggactgacatcggttctccttagatcacctgagttcgtgctggggaacggggcgcttcttgcagcgacaccttttgaccctctatttattttccttgctcttctttatcgccacgccaccgagttttttgttcctttctctcagctgatttcccagtccgactattctcaggaggttcgcagaaaccttacgtggctggcatccgtaccagaagtgacgaagcgaatctccctgattgcggacatccgtagtgctggcg

SEQ ID NO: 93 - DNA, 12788 bp, artificial sequence
  theoretical sequence
ggaacgcgaaaatgctgaggtctctctgtggtgcgagaggagtcgctgtatccctgtttccacggtttaagagctgcagagaagtacagggcctattcgtgttcagggggggacttagtgggtggtcgcgtccacgcggtggtgtagctgaagttcacgaggttgagagttgcttatttcaatgattttccttcgcaggtacaacccggatgaggcgcgcctgctgaagcagtatggcgagttgcctgccaacgccaagatcaacgaaagcgacgtcttcggagatgaagacggcggtggcggaggcatcgacttccaggacgactcggatgtctccgatgaaagttctgacgaggaagacggcaagaaggaggaaatggatattgacgacgtgagtagagagcgcagggggaggaaagggggaaaggtgtgttgagtgcatgagacagggactgaggtcgcgggtcgctgtcgattcgatttgagttgaaaggctctggatcgcgcgcgattgcaatcggacagagcgtctgtcaagaatcatagttaccatagaacaacgacagtacacgaggtcgagctcgaggaggaaaggagaaacgggaggaggatccgcagacagacactctagtggggcgcgacgctggaggtgaagagagaacacgaaggatggataaaaaatgataaaaggacagacggaaaagtgtggggggacggcaatggagctgtggataggaagtagatgcttggggttgtggtagcgagcacacacatagaggaatgagaggaacttcaactttcagacgagaaatcgattcgggaaaatgtgggtatttataagttaatatagatatacatgtacatatgagtaaatgtcaaggcctatgtgagtaaatacgcatacgcatatagtagccacccgcgccgcagggacataacggctttttcaaaaaatgcaaaaggtatgaacactgctgggttctcttccaacggcgcttttacagcagccactgtagcgctcgaacggagcatctggtctccgcagtttttaggtgtcggctttgctgtgcgattcgttcgttcgactttgacgcgtggtcttcacgtgcgtttggtgtggtgtgtgtgtgtgtgtgtgtttgcagatttgagggctttcgtcgcgttcttcccgtcttcgcaagttactgtccgtttgtttctccgtacgcgtcgaaatatgcgtgccgtctttttctcgctttgcgtttcctctgcttttcgtccttctcctaggctctcgaggagagtctgtcgtgcctgagtccgggcgacagtgggaatgttggagttgtctaggaggtctctttcttcgtgtctctttttctctttgtctctcctgacagccctgatttcccacgtccgtgtcttccttgactgcatgtggtggtgtgcactcaaacttctccgattgaggtcgtccgtgtatttgtcgccaaagctcaccgagcctctctcgcgctttgatgccgcgcgcagacgagtggttgtctgcgagaatatttttctctgtgcccacacgcattcttcgacttaggacggtacagacgcccttgtacaacctccctccaccgtcgtgtattgccaacactggtgcgtagcccggaaaaagaaaatcagagaatttcttagaaagccatcattcgggttgcctcgcttacaacacaggttcgctaaagggcatgcttcacagccgtcgttttcccgttcgcgcgaattcctctctcgcttcagtcgcggttgtagagtgccggaaactctaaagcctaggaccccctgaccccttgtctgtgccatcgcttcgcttagcttccctcgcatgacatcgaggcaattgacatcagggatttgccagaaaccaggtgttgttcttattttaggattttccggctaaccgttgtgactcactgaaccaacctgatatgggtgataagattgatcgtggagtaccgtatgaaacaatatgcctcaactgtaaacgtctttatttaaccaatttaggattcgcgcgaccgcctaaaccgtaaaaggagatggtcgcaggcctgctcaacatccagcctgtgcatcggtgaaaatgaagtgcgccacacgcgtgcacatttccgtgccaggataggcgcgatagggagtgacctgaatccattaggtatcctcctatacggtgaggaagacagttgacaaaggacctggtcgacggacactttgacggatgaagctgaggaaatggcttgtcataaccgttcaattcgggtgcgaatcccactacttgctaacgcctggttcctcctcctccaagaggatagtcccaaaatgtcgactgttgctcgtagggtgcgtttgtgtatgcgagtttcctatacgtacgcgaggagttgtacgcccgtcataattgactgaaagagagcacatcccgtacccagagcagcggcttggatacctgtgagttggaggcaagatgttacagaggtgcaactacttcgacggaaccgtcgttttttctgattccttgcattctgtgttgcaacgagacttttgaaacagggaaaccttgatgaaagacacaatatttcagtgtagaaggaatccgctgcccggcgttctgtgttagctgccaggtcagcttcccccggaacattcttgactagagtcaaataaacatatcgattcttggagtgttgagttcccaatgccaagttgcaatggattgggtaggacgtaacctttctgttcaggaactagaggccgtggcgctctgactttgccttgcggacatgatgtcagattgtcttgcctggcgcacggccatatgtattccattggtctcattgatttgtcgataaatgtccgcctcgagcctgagacccatattcattgcagtttcctccatctctcctgtccagtgctgttagctagtttctttctcatgtgatgctgagtcttgcgagtctcaggtgtgacactggggcagccgtcacggtctaatggtctccgttaagactaagagacgttaccagttcacacgccgccaggagcgccgccggaccgatgtttctcgatttaatgaaatcagtttgaatctctgggtagaacagcaatagacagcaagtcttgcgtgaggacttacgttggatatgaaaagcagtaccatacccagagattttgtcctattcgggccgactccgctgaatttagtaccgtcagtggtaggccttttaatttgtgtacgtgaaagacatagagctgaaaacatcccagaacctcacttggagtcatcgctgcttcagtgttgggcagatccgtaccaaatagtagactcctctatattcaggcttttagtattcaacttcgcgcggccccggaaaacatcggtcctagtatgccgcgcgctatcatttgtgtggcatctgcaagacccgacgctaggacgaacgcgaggacaaagaaacgagacgcagcgtagttgtgtctgcttggacacgagcaggctgtgcgtcgtttcaaacattccgagcgagtctcgtgagcagtcaactaaaatgggaaacgaagcattaaatttatcaaacatacacgataccagcttcatggtgacagttctgatgctagcgctgtgttctagagtagcgagtggctagcggaagacagtaccagccacgttagcagtccagccctgaagtgtttgtcaatgcaccactggataacttcgtataggatactttatacgaagttatggatccactagttgactgccacgtgtagtatcctcgttgcaaacactttttaatgatgcctctaacacgcgtatggtgtgtcatagagtattcgttcgtcctctgtgagatcattaaaaagaatcaatgcttgcctatggtacacaactgtatctgaaacagcgctctccactgtatcgcattgcagggtattattcacaacacctcagttttttttgccacagattgcttgccagtcacttctgtagacacacgctcgagcaggcggtgcgaaacctcactgttcatttttctaatcaatcatgctccgtttttccgacaattgggggagttttgaacgctggcggaatacgtgttgctacgtttggacttgtgctgggaccacttcagcacgttaatcaggggaccgtcaagcagatccttgctctagatgtgcctatgagaaggaggaactttcatgtggtgcaacggggcgtttaagctgtatcaaaagcgtcacaggaagtgctgccaaacccggaatgcttacagtacttgacaccttgaaactgtgtatgtggtgaagcggcgacgagaaaccgagagtgcttttggcttgcgcttctgagtggtgaagtggaggagccttgagctttctaggccgtggtcgctctctcgtggctttctgattcaggctggatacagcactccgtcatcgtgcctgaacgggattctccatgatccacaacagacgaggatggcagtgcacgcttattggtatcataacgtctttttcgatgaaacactggatgacgctctcaaccgccgtctcaacctctgttagaacctcctgtcggtgtaccttccgcgctggagacgctgaacattctatatgcttacaatgtgaacaaggacatcaagaattgttggctagcaaatcgacgtagagtgcagaagtcactaacgttgtagttgtgatctccagcgatttcggagcatgttatgccgcaagagggggctgacacacatacaaacacgcgttcttaataaaaatgatcaatacactggttcactgtatgccttcgcacacgggggaacaacaccgagagacatcgtgcgtcagtacgttctgaaagtgttctaaggacacatttagtgtggtcggtctccagatctccgcaatgctcttgcactgcattattcgttactgcagaatgcctgattgttgattacggtcgagcgttggattgctgattacagtcgagcgctggaatgttgattactgtcgagctcttcgtgatgacagaagcgctagctgtccaggtgcttagggcaaaatgtgtcttgtgctcgttgcgacgtgggatggtgtgcgtcgcactgagacacgctgcttcatgcctgctacttccctgcggtactattggagcgcctcttgtgtctctcgtgcgtaaccacagtggcagtttaaaacaaaatctggttcgcactgtcaatccctcgaagcctggcaagctgaattcctgtctgctctttggcggtcaccattcagtgggattggccgagattattaattttgtgtgtgaaattgcatggctttgaaacaccacataccacacaacccatccgcgtctcaagactatccgatcaagcgcgtctcgggcgcgtgtgtgttttcgtagagcagtgtgtgtcactttcctattctgtgtgcagtgccacgaggtgacgaacctgccatttgtagtcgtgttgttgtaatcgtgtattatatatatatatatatatatggtgacaactcagattacggatacaacgcagcgtacattgttatgcgacgctcgctttcaaggccaccaacttaagccgggtggtcattgtctgcagactgattccaatttatctacactgtaggtctgggtgttgctttcagccaagcagacaaagccactttgtaaaccagcattcaacaatggtgacaacaaccacgccaacgccacccggtgcgccggcagtggtgcccatcttcgacgttgtctatcaactgaatccgcacgtgtttagaagtcgcttttccaggaggaatcgcgccaggcgtgttgcgagcagcaagtcacgctcgataattcggtggcttgggtatcttacggtgctcgctgccgtcattttgctaggagcgtatgcagtaaggcgtgtatcgcgcgatctgtccgactcagtgcgggaaacacgacgaggcaggagaattacaggcagcgtacctcccgggactacccgtccccgttcagagtcttgtactggcacacaagtggacggcggctgcggcgctgacacgtcaaccgatggaaagtctgagagtgaacagaccgaaaacggggaggactcacgcttttccacccggacccctattcatgtcactgcatcgacttccccattcgcgacgcgcaaggcggcggaagaacgctcttcgagtccgagagacagaaaagttccggagggtgcccaactccccacgtcgtcgacacctcatgcacaaagaaaggactcaggtagtgatagccggaacccatctacactcataccttcaccaggtaccaacacgtttaacatgaacttttatattatcggagcaggctcttcagcgctcgattttattttcccgcacactccggatgctcaggctacagtcgtctcccccccccgcagcgcggcggccgcaccaactgtcgaaacagttccaagggttcgcacttactcgacaccaacaacattaaccctaccaacggcaccagcgaccgccactagcaaccacatgcatgcctcagcgactccctcgccaccggaacgtcctcaaaacttccgtgggggactcatgcggcaaaacggcatggttgaggggacatcgttaacgactaccgaggctgggatgccagcgccgttacaaagccctcaacacattgagacggaggcgaggttaacgtactcaaatcatctcaagagcccgcatacaccagaaactccaactgtccactcaatagaccccgttgtcggcaccagtggccattccgtagcggtgggatcgcagtctccagccggtggacctcctacagatagccgcaccccagcggcactgacccccacaagttcttctttctcacatgcagattctcttgaaacctctgagcatccgcaaagtggaccgtcgcttcatccattaatctccgggatacaagatgccgtgcaaagccaacttccactatcacaacaggagactctccctgtggtagaaaatgcgactttcttcgggccgcaacagactccaccgtggatggacgaaactgcagctgctgcaattccactcgctccctcacaaccagggtcacgtacacaacccatctcgtctccgcatactctactttcccgtagcggcggtgtgtcagctgtgccaggaccacccagaacagaaaaccctcggcaaccacaagttccaggcgaaaactcttactactctgtaccaactgagcggacgatctctgatccaggtccccaaagggcgggtgcggctcaggctgatggtatcggggctggaggcccacgggacacacaatcagcggtaactccatacccgtacgacgtcccggactacgcgtaaaaacttaaaaacttaagctgcagatatcagatctccatgggaggtccacacgaaccaggacccgctcgattaattaatcaccgttgtgctcacttctcaaatcgacaaaggaaacacacttcgtgcagcatgtgccccattataaagaaactgagttgttccgctgtggcttgcaggtgtcacatccacaaaaaccggccgactctaaataggagtgtttcgcagcaagcagcgaaagtttatgactgggtccgaatctctgaacggatgtgtggcggacctggctgatgttgatcgccgtcgacacacgcgccacatgggtcaatacacaagacagctatcagttgttttagtcgaaccggttaacacaattcttgcccccccgagaactcccgaaattcgtcaacagttacaccttctttcagcaagcccctggagttacttctcatctcactaggattccaactaccgaactttcttcacatcggatgtagggtgtaaggttcccaccttaacaccatttttttgtgcgcgtatatggttttcagcatgttcatgaaacggtctatcaaccgatctcgaaggcgacgcacggatgaaaatcaaagaaggcacggtttcatccgcaactaagaaggcctccgattttgagtacgaagccttggccgctgtgccacgtttcggcgggaaagggttattttgatattgtgctacctttctagtccggtacagttcttgaatttgtgtgtgaagcggttgtgtttccttcctcttcttatggaactggttgagaggctaggagcagcaagatgcttgggccgaggatgttaccgcttttgagttatcccagagtaggaagctaggtcccgttgacatatcgcaacgaaacggccacgctttcttcgtccttctattgccaaacggttgaaaggttactgcatgcggtcgcgtgtattatgcgtttggaaaatgtacggcgcaggttcctgtcacgattacagtacattgacatcttatgtaaggtgaatttcaccatctggtacggtgaccctcaaatagactccataattgtacagcacttgactatgtgcccatgaattgacttgggacttggaatctttgttgaatcaatgccgttagttgacgtggaacgtctagaagttgacgacggccaacgccaagaagcggacaattgtacttgcgcctatacggcgtaagagactccgaaaaggtgtggaaagttgccagtatatatttgtagtgtccgctaaatgaattcatatgaggcacaaggtgaagtgtaagttggtcccgatacctgcgggcggcccttatgaaaattgacgcacaccttaagagacatgggaaacagctcgtgttcatttgcctgttaaggctaacgcccctgtttaaggagttgccatgcgtaccccttgacactatgttgagttgtcactgcgacaccaatgctggctttcaagtttaggccaatggagccggcgaccttcaagtgtgcgttaattgaaggcgttggatggccacgcagtgatgccggaacgtcaccttaatacgtttgcgtgcccagtgacttgtctggattaaatactgcgaaaacgcaaagagtgtaacgcttcccctccgctactcgatgtgattcataacaggtgaaatgtcaggcgaatcacgctcatgattactcaatcttttaaccactgaatgccgtacagaagatgcgacagctatattaacattgtgcggcaagttccgttggttgttctgtctcatgcactgtcttgtaccgagaaacagtattcattgggttacttagtcgcctctttcgttggacgaccttgcactgtctgtggcaaccagctagggagactttgctcttacgcaactccttttactggcgcgtgaatttgctatttgacaacgaagcatttccttgaagaatgaaaaagccttatggagtttgaacacacacgcgccattgctggggtgtacaagacgtattgtatacgctggattctgatctcagttttcggctcggaaacgaggggaactgctgagacatgagtgacgccaagcaaaatctcatgccaaagaaacgactcgaagtttctgcctggcagcgtatccagtttcggtctttgttctgcgcacgttcccccctgctacgttagcggtggaaatctgcaacagagagccgcctgctttttctcgactctgtcagccgttggcacctcccattaacgctacactagacaaccatgattacgcaaggaaatcaggcgccgaattaacgtcgtttccttttcctagaagcagaatgtatatctgggcgaatgaatcgacagtagaacacaaaaatatgttaccgcacaggacaccggtgcagagtaaaagtttcgtttgcgttcatatactctaccgcctctgtgcctgcaactacctgtgaattagaaaatcttcctcgtaccgtggttgcagcaaaaaattgccgaaggaagaatttgtacttttccgttcttcatgccccactgctgactccgttctgctgcagccactgtttcctgcatcttccttcgcattcgttttccctcgcgcactttcagaagctcggtgagttacgcgtgccttccatggcacggcaaccgccacgactggagtggccgcgtgtctctgctgcgctgctgcattcaccgtttccctctctgtgttggtgttcaccattcgtctactctctgtgcatccgtttcctgcgtttaggggaaaggtccacccaccgctggcgccaccggcgggcggagaatctcggtttcccggcggtgcaattcgcacaatgatgtccggatacaaagccagagactgggtttgctcaaccgtggagttgcactcgatgtgatcgacctctggaagcagttgcgtgttttgtgctgtagaggcaaaggcgtggttactgtggctacacgattccgctcccgcgtcggtacgtctgcctccaggcaaaaaagcactatggggatttcgctgttcagcgatgctctgcgtgaatctgtcctgaggagcttgcaaagaatcaaaagctattccggtttgccgctgctgtagtgtactcgtgaaactaaagaatttaagacgcgccagatgccgttccgtacggcgaatagcctgaaagcgcaggttccgcagcacacacaccccgctgcgccttaaaagagaaacggcaatacttccgccgcgtggaatcaccacagaaaacaggcctttgcatgcactgatgcacactcgtagatatggacacacccgaccgtggacgttcacttccccggaagcgtgcaggccgggaagactgaacggaaactctcaatcgttttgaatgtaattgctgttgacaccgcagagaatgttagaaattaccatccaggttcgatgaaaatagataattgtgatcataagcacaggaaatgccttattcgaaggcgaccgaatgtcaacacagatgcacagacggaggaccgaactcttccgtacataataacatcaggagtgaggtgtgtgcacccctgcagtcttgtcgcgaaacttgagtgcatcatgcaaatgataacctacgcctacgttcataaggcatcacatttgcttcctcttccagtttccctctcggtggctccccgtataattgtcgtaatcgtggaaatacgtcaaggaaaaacacatgggcgttctcatgcaactctgcttggggacaaacacctccacataaatccacctggtaatgacaacgactgcattgcaaatatgaagaccgaagcgcttctcatacgctacatacatacatacatgcatacatacatacatgcatatatatatatatatatatatatgacaaagactgcagtgaacatttggaaacaacgcaaacggtcttcaccatgtacgcagcctacctcctgtgcatccctcaatttccgtgttcgccgatgacgtcgctctgaaccggagtcttccccgcttgagaccgaccctaccgagatgcgcacaaagatgtgaaatgagagaagacataaaaaaagagacaaagctcgcagacaataaatgcacttgagcagtgatctagcaaaccgtctctgattagtcgaggactcgctgtcgccacatgaagacactcccctccaaacgccagaacctaagtcgtgagacgagtgcgagaaacctggacccgagaaaaaagggaacaccagtgagagaacatggggacagagaggaagaagatacaccagagactcgcgaagagcagaagagcacataaaacggggaacgataaagacagaacataggtgcaaaggaagggtagagccacaacagagggtcgctaccaacatggggagcgaggaagagaaagtaagagagttcaacagagaagttgcaggaaaaaaaagcggaggagaggcagtcccagcggcgaggaccgggactgatatatgccagcaacaaagacatattatctcgagaaatgtacagctctctccctcttcgccacgtccaatcatcggtctccctcgggagcgaaacgactgagatggagacgaaatgacagcaagagatggacagaagagaagaaagaagatggagagaaacggagggaagcagatgacgcaggaaccacagaatccacacacgcccgtcgcagaaagacgcatggatacgcggacaccccgaggagcgaaacaacagaaacaagctacgtaagacactttaccttcgctttgagattttcgtcgttttctttgcgactggccgcccacacccctctcgtcctccttctgtccctgcataaacaaggaggaagaagaggaagaggaggaagaggaagaggaggaagaggaggaagaggagggagaggaagaggaggaagaggaggaatgagatctccagaggatgctgcacccttgagagcggaggacgggagggggagatgaagacaagacgttctgtctcctcgtctgtcccgcacgttctcttgtctgagattgtacggaagacgaagtaggcaagcgcgagggagcagctgtcgcctgccttcctctacttcgagaaggctgtcctcgctggcgctgaagattcaaaggcatgggagggagaggcacgcacacaggtgagacagaagacagaaagtacgaacggagacagggcaagtggaaagggacatggacggagacatcgtgagactggcaaatgaaacacaggacaaacgaagaaacgaaagcgcgacagtggcgaggcacgatgggcgaggagataagcgatgcacggtcgaggaaccgacagtcgacacacagagaaagaatatcttacagcatagagactactccacatcgact

SEQ ID NO: 94 - DNA, 7661 bp, artificial sequence
  plasmid
agcttataacttcgtataatgtatgctatacgaagttatgatatgcatgtccgcgttcgtgaaatctctgatcaagcggagtgatcaggaatcatcgtctcagcgggatgacgttgcggagcaggccggctcgcggtgggcagtcagatgccgaaggcgtaactcaggacggcttgcgctcatcgcagaacaggggtggtgcctgcattgggtgcggttggtgatcctggttggaccggtggagatgcgcgcgcacgaaggggatgtgtcagaaacattttgtttgttctctgtgaacttttagatgtgttaaaggcggcgaatattagcagagagtcctccttgttggattctctcttgaatttcgccctttccttctctttgcgagtctcgtagagaacaagcactcgttcgccgtccctgacgacgcaacccgcgcagaagacatccaccaaacggtgttacacaatcaccttgtgtgaagttcttgcggaaaactactcgttggcattttttcttgaattccctttttcgacaaaatgcatgagaaaaaaatcactggatataccaccgttgatatatcccaatcgcatcgtaaagaacattttgaggcatttcagtcagttgctcaatgtacctataaccagaccgttcagctggatattacggcctttttaaagaccgtaaagaaaaataagcacaagttttatccggcctttattcacattcttgcccgcctgatgaatgctcatccggaattccgtatggcaatgaaagacggtgagctggtgatatgggatagtgttcacccttgttacaccgttttccatgagcaaactgaaacgttttcatcgctctggagtgaataccacgacgatttccggcagtttctacacatatattcgcaagatgtggcgtgttacggtgaaaacctggcctatttccctaaagggtttattgagaatatgtttttcgtctcagccaatccctgggtgagtttcaccagttttgatttaaacgtggccaatatggacaacttcttcgcccccgttttcaccatgggcaaatattatacgcaaggcgacaaggtgctgatgccgctggcgattcaggttcatcatgccgtctgtgatggcttccatgtcggcagaatgcttaatgaattacaacagtactgcgatgagtggcagggcggggctcctaggatggtgagcaagggcgaggagctgttcaccggggtggtgcccatcctggtcgagctggacggcgacgtaaacggccacaagttcagcgtgtccggcgagggcgagggcgatgccacctacggcaagctgaccctgaagttcatctgcaccaccggcaagctgcccgtgccctggcccaccctcgtgaccaccctgacctacggcgtgcagtgcttcagccgctaccccgaccacatgaagcagcacgacttcttcaagtccgccatgcccgaaggctacgtccaggagcgcaccatcttcttcaaggacgacggcaactacaagacccgcgccgaggtgaagttcgagggcgacaccctggtgaaccgcatcgagctgaagggcatcgacttcaaggaggacggcaacatcctggggcacaagctggagtacaactacaacagccacaacgtctatatcatggccgacaagcagaagaacggcatcaaggtgaacttcaagatccgccacaacatcgaggacggcagcgtgcagctcgccgaccactaccagcagaacacccccatcggcgacggccccgtgctgctgcccgacaaccactacctgagcacccagtccgccctgagcaaagaccccaacgagaagcgcgatcacatggtcctgctggagttcgtgaccgccgccgggatcactctcggcatggacgagctgtacaagtactcagatctcgagctcgctaggaatgcattagaggtccacacgaaccaggacccgctcgattaattaatcaccgttgtgctcacttctcaaatcgacaaaggaaacacacttcgtgcagcatgtgccccattataaagaaactgagttgttccgttgtggcttgcaggtgtcacatccacagaaaccggccgactctaaataggagtgtttcgcagcaagcagcgaaagtttatgactgggtccgaatctctgaacggatgtgtggcggacctggctgatgttgatcgccgtcgacacacgcgccacatgggtcaatacacaagacagctatcagttgttctagtcgaaccggttaacacaattcttgcccccccgagggataacttcgtataatgtatgctatacgaagttatggatccactagttctagagcggccgccaccgcggtggagctccagcttttgttccctttagtgagggttaattgcgcgcttggcgtaatcatggtcatagctgtttcctgtgtgaaattgttatccgctcacaattccacacaacatacgagccggaagcataaagtgtaaagcctggggtgcctaatgagtgagctaactcacattaattgcgttgcgctcactgcccgctttccagtcgggaaacctgtcgtgccagctgcattaatgaatcggccaacgcgcggggagaggcggtttgcgtattgggcgctcttccgcttcctcgctcactgactcgctgcgctcggtcgttcggctgcggcgagcggtatcagctcactcaaaggcggtaatacggttatccacagaatcaggggataacgcaggaaagaacatgtgagcaaaaggccagcaaaaggccaggaaccgtaaaaaggccgcgttgctggcgtttttccataggctccgcccccctgacgagcatcacaaaaatcgacgctcaagtcagaggtggcgaaacccgacaggactataaagataccaggcgtttccccctggaagctccctcgtgcgctctcctgttccgaccctgccgcttaccggatacctgtccgcctttctcccttcgggaagcgtggcgctttctcatagctcacgctgtaggtatctcagttcggtgtaggtcgttcgctccaagctgggctgtgtgcacgaaccccccgttcagcccgaccgctgcgccttatccggtaactatcgtcttgagtccaacccggtaagacacgacttatcgccactggcagcagccactggtaacaggattagcagagcgaggtatgtaggcggtgctacagagttcttgaagtggtggcctaactacggctacactagaaggacagtatttggtatctgcgctctgctgaagccagttaccttcggaaaaagagttggtagctcttgatccggcaaacaaaccaccgctggtagcggtggtttttttgtttgcaagcagcagattacgcgcagaaaaaaaggatctcaagaagatcctttgatcttttctacggggtctgacgctcagtggaacgaaaactcacgttaagggattttggtcatgagattatcaaaaaggatcttcacctagatccttttaaattaaaaatgaagttttaaatcaatctaaagtatatatgagtaaacttggtctgacagttaccaatgcttaatcagtgaggcacctatctcagcgatctgtctatttcgttcatccatagttgcctgactccccgtcgtgtagataactacgatacgggagggcttaccatctggccccagtgctgcaatgataccgcgagacccacgctcaccggctccagatttatcagcaataaaccagccagccggaagggccgagcgcagaagtggtcctgcaactttatccgcctccatccagtctattaattgttgccgggaagctagagtaagtagttcgccagttaatagtttgcgcaacgttgttgccattgctacaggcatcgtggtgtcacgctcgtcgtttggtatggcttcattcagctccggttcccaacgatcaaggcgagttacatgatcccccatgttgtgcaaaaaagcggttagctccttcggtcctccgatcgttgtcagaagtaagttggccgcagtgttatcactcatggttatggcagcactgcataattctcttactgtcatgccatccgtaagatgcttttctgtgactggtgagtactcaaccaagtcattctgagaatagtgtatgcggcgaccgagttgctcttgcccggcgtcaatacgggataataccgcgccacatagcagaactttaaaagtgctcatcattggaaaacgttcttcggggcgaaaactctcaaggatcttaccgctgttgagatccagttcgatgtaacccactcgtgcacccaactgatcttcagcatcttttactttcaccagcgtttctgggtgagcaaaaacaggaaggcaaaatgccgcaaaaaagggaataagggcgacacggaaatgttgaatactcatactcttcctttttcaatattattgaagcatttatcagggttattgtctcatgagcggatacatatttgaatgtatttagaaaaataaacaaataggggttccgcgcacatttccccgaaaagtgccacctgacgcgccctgtagcggcgcattaagcgcggcgggtgtggtggttacgcgcagcgtgaccgctacacttgccagcgccctagcgcccgctcctttcgctttcttcccttcctttctcgccacgttcgccggctttccccgtcaagctctaaatcgggggctccctttagggttccgatttagtgctttacggcacctcgaccccaaaaaacttgattagggtgatggttcacgtagtgggccatcgccctgatagacggtttttcgccctttgacgttggagtccacgttctttaatagtggactcttgttccaaactggaacaacactcaaccctatctcggtctattcttttgatttataagggattttgccgatttcggcctattggttaaaaaatgagctgatttaacaaaaatttaacgcgaattttaacaaaatattaacgcttacaatttccattcgccattcaggctgcgcaactgttgggaagggcgatcggtgcgggcctcttcgctattacgccagctggcgaaagggggatgtgctgcaaggcgattaagttgggtaacgccagggttttcccagtcacgacgttgtaaaacgacggccagtgagcgcgcgtaatacgactcactatagggcgaattgggtaccaggcagaagtaaagaaggttcctccggttggcggaccaaaggcagaagtaaagaaggttcctccggttggcggaccaaaggcagaagtaaagaaggttcctccggttggcggaccaaaggcagaagtgaagaaggttcctccggttggcggaccaaaggcagaagtgaagaagattcctcctggcgggcctctaggcgcaccgaaagctgacggcagcccccaagcggcacaggacggcgggactctaccgaaggccaagctcgggccaccaccagggttaggaaaagtgctgactagtgaagctgctgagagtataaaagaaacaggcccagcaaagaaaagcgctttgcccggaaaaggagtgccgccactggggaagaaggggccgccactggctgcaaaggtagaagagaaaggtggagattcaccgccagctgccgcgaaggcttcgtcaagttcggtggaccaagctgcggatcagaacgaaggagcgggagtagcaggtacacccgtaaaaaaaggaccgcctctcgggaaaggtccgccacccaaaaaagcgcccttggtggggaagaaggctcctacggctcctgaggcaccagacgccaaggtaaggtcgatcagtgagctggacaccggagcagcacgtctgaccaggctgacacatcaacgtaagttccggaagtttgtaaagaagaggcggctgacaagcatagagttcataccagtacacgagaatgcacagcgccgccttatattcgtcgggggggtcgtcctaggtccgcattgcccgctgtgcaaagccaattattatctaaatcgtttgttggttgtgtcgttgtgcggtgttgttgaccaggctgacgacgcgccaggaacggcggcgaaaaaagggccgcctaaaggcctccctcccaaaggaaaagcgccccctaagggtacgttggctagagacctgttgatgatattatcggaggatgcttgctacaagcatcggtgatatttgctttcattctcgtttagcagcacactgacagctccatggcatgcacggaggttggacagcagctgctgtcggactgggcagaaaacggggtcggttttcggtcatagagcttgcacttgttcttcgccacacgcgttgattgtagggggtacagtaaaccatgcgtagagtgctgaaaagggcgtttcaaaggtcacctagtttgcagctcgttagccggcatacgccaccaggaagttccgatattttcctctttctcttgtttgtgtccaggcaaaggatttctgtgagataccgtcgacccatgttgcaaccggcactactctagacaaataaatctgatctggtggcaagagcaggtgctacccgcaacagacgcgcatttcttctggttgctggtctgccgtgctgtgcatatagagcaaaagcacacccagcaatttgtttgttccggaatgaagctacatgagtgtatgtctgaggatcgttgtgttaacgaattcttacgggaaacaccagtagtgcccgtgttaattctccagtaaaacactacgtttcaaactctacccctcttacgcggtggcgccgttcgcccacctcccctcccgcgggagagacaacgctcggtgtccgcccgtcgctgcgagttctctgattgccttctagcgcaatagccagagcgctagaaagactgaaacaagagaagccgtctacaaacactgtagtgattgccttcgtccagaagcctcactcacattacagacctaggcagctcatcgtggcacctagcgttaagcaccgcttacataacaatgttgcacgaaccgctttgattctgtagcataactgccagcattcaaaatggtacttctaacgaccgattaccgacaaccgctcacacagcgaaaggctgccggtactctcggaatggacgcgcgcactgaagtctattattcacgtcgtgactaccatcgacgatccttgactctttccgcccgtccactgggccgtgtggttgaagcgacgtcactcagcttgaatgtgtagtagccggccgcctgactgtaaaatacacttgtattctacagtgtcaccatgctacgaacgttgtcgtacatcacttgctgcgttcgcatcctcacgtaactcaatggaacgtacgacgaattacgtataaaatcggacagaatgcaccataacacagttttcttcactgagacagaaacatctgaccacttaacatgacttcaggcgacatactgcattggatctaggctagaatctcaggctagaaaatacagacccgagaaatatggacggacgggaaggcaaaaaaaaaactaaaaaaaactaaggatgggaccctcgcgcatgcccgacttgcaggtgttgcgcttcttttcttgcgtgatcaa

SEQ ID NO: 95 - DNA, 2420 bp, Neospora caninum
catttgtagatacggttgcacacactagtctttgagggacagactccgatcctgcggtggtatgcgtgggttcgaaccgcgattgtggcaccagcaaaacttttaccgagcgaaaactgagcgattctacaaacaatatgggctcattcctattttttttcctgttatcacaatgccagaggccgtcataagaactgcttcatcattctcacacgtggccttcactgtggctcaaaatgaattttatccattgtttaaaaactgaagctgctttcaaccggaacacggcgtgaaaaatttttttgtttctcggactacacgttcactcatatatgccactggcgtttttacttcgacgttgttgcctttacggcagaattcacagttcaccgaacccggaaatggctttcgaatactctagggtagtaaagatcgttcgaagagtcgtcgggcttggggtgacaaggtttctaaacagagttggtttagacgcgtgttgattgccacgggcagggagcaactgcctctacggtttcgtggctcttgtggtactagataaacgcctgacagaaaaactgcggttgtgtggcatgcggcacggcgggattggccttgccgaagtaacgaggggaagagtcgaagacggtcgcagaaggtggaggcatcaaaaacggtgaaaagtgtgtttgccgggaccgccgtcaaaggagagtgtaccgtttgtactggtgccgtatgaactgaaacccgagcaatcctcctattaatgcattccaaattttgagttacgataacgggccttcggcacactatggctgcgatctcactatacagtgccgagagactctcacatgttctataactcgaagtagcacgccagcatctacaaacggatgtcgatagtgtcaccagagctctggctatcgggacaaaaagttttgcttctagtggcttgttgaaccgtcttcatcattgatgatggataccgtaggtacaacaagtgccacatagtagctgctggtagttgatgccgaggaacgtgagcacgtctttcttggactctactgctgaggccactgctgatgaggtgcctgtgtatgggggaagtgtaacgcacaccgttctggcaattgcgcttgaatccacacttgaacaaccatttctgcatgcgccgtgccgcatttggcacacctgcgtagtcccttggggtacttacgacaattttagattacacacatgttgacgagcaagcgtatctccgcgagcccaccgcatggcagtgaattcgctcggcgaaagtcgcagtcgcagatacgatttttttttgttccccccagtgcggtggaaatcgtggctggtgggcgcctgcgcggcgcatgcacaccgtggaaccgcaagacattctgcaggtttcccacccgttgtcttcctctcccttcaccgccgtaatcttgcgcacacgctggccgttgacggtcgaatggagctcgcgtgatcagaagatgtgtcccagatttcttgacctggcggaatgagacgcgaaagtcgagaagagtgacctcgcaaattcagcgggctggtaaacttcagggggtgcggcgataaaaccacttacagccagtggttgcccagcaatctgacctgtccgtcactgcacttcaccgaactgaggtccccaggaagtatagttcgtttcattttctgagcggtgctgtactcaaactgactccgggaactcactttctactgtgtgttagagctgatcagtgttctgtgaccatggcaatcggacgcggcggacaggattctcgtgcgctcaacccgagaatccttttgatatcatcatggaaaagatgcacccgcccagatgaggaaacagaagaagcagagccaccactacttctcgaggatgttcgagtcaagtctgggcatctcccaacgcgctgcgagccagctaatcagcaactgctcgagatcttgcttcctcatccgtcccaaccgagcattgttgtagcatttttatgggcgaactcaacactatatgaactgaatcagttcactcgtgacatggggctgacatcggttctcctgaggtcacctgaattcgtcttggggaacggttcgcttttggcagcgacaccttttgaccctctgtttattttcctcgctctgcttcatcgccacgccgccgagttctttgtccctttctcgcagctgatttcccagtgtgagtattctcacgaggttcgcaggaacctcgcgtggctggcgtccgcgccagcagtgacgcagcgaatctccctcgttgctgacgtccgctgcgccgacagttcgaccgttgatggcccgaccctggggggagaggcagtttctacgtcgctaggcgtgcaaccaattccagagttctgccgtctgaatgt

SEQ ID NO: 96 - DNA, 2423 bp, Neospora caninum
aggcagaagtaaagaaggttcctccggttggcggaccaaaggcagaagtaaagaaggttcctccggttggcggaccaaaggcagaagtaaagaaggttcctccggttggcggaccaaaggcagaagtgaagaaggttcctccggttggcggaccaaaggcagaagtgaagaagattcctcctggcgggcctctaggcgcaccgaaagctgacggcagcccccaagcggcacaggacggcgggactctaccgaaggccaagctcgggccaccaccagggttaggaaaagtgctgactagtgaagctgctgagagtataaaagaaacaggcccagcaaagaaaagcgctttgcccggaaaaggagtgccgccactggggaagaaggggccgccactggctgcaaaggtagaagagaaaggtggagattcaccgccagctgccgcgaaggcttcgtcaagttcggtggaccaagctgcggatcagaacgaaggagcgggagtagcaggtacacccgtaaaaaaaggaccgcctctcgggaaaggtccgccacccaaaaaagcgcccttggtggggaagaaggctcctacggctcctgaggcaccagacgccaaggtaaggtcgatcagtgagctggacaccggagcagcacgtctgaccaggctgacacatcaacgtaagttccggaagtttgtaaagaagaggcggctgacaagcatagagttcataccagtacacgagaatgcacagcgccgccttatattcgtcgggggggtcgtcctaggtccgcattgcccgctgtgcaaagccaattattatctaaatcgtttgttggttgtgtcgttgtgcggtgttgttgaccaggctgacgacgcgccaggaacggcggcgaaaaaagggccgcctaaaggcctccctcccaaaggaaaagcgccccctaagggtacgttggctagagacctgttgatgatattatcggaggatgcttgctacaagcatcggtgatatttgctttcattctcgtttagcagcacactgacagctccatggcatgcacggaggttggacagcagctgctgtcggactgggcagaaaacggggtcggttttcggtcatagagcttgcacttgttcttcgccacacgcgttgattgtagggggtacagtaaaccatgcgtagagtgctgaaaagggcgtttcaaaggtcacctagtttgcagctcgttagccggcatacgccaccaggaagttccgatattttcctctttctcttgtttgtgtccaggcaaaggatttctgtgagataccgtcgacccatgttgcaaccggcactactctagacaaataaatctgatctggtggcaagagcaggtgctacccgcaacagacgcgcatttcttctggttgctggtctgccgtgctgtgcatatagagcaaaagcacacccagcaatttgtttgttccggaatgaagctacatgagtgtatgtctgaggatcgttgtgttaacgaattcttacgggaaacaccagtagtgcccgtgttaattctccagtaaaacactacgtttcaaactctacccctcttacgcggtggcgccgttcgcccacctcccctcccgcgggagagacaacgctcggtgtccgcccgtcgctgcgagttctctgattgccttctagcgcaatagccagagcgctagaaagactgaaacaagagaagccgtctacaaacactgtagtgattgccttcgtccagaagcctcactcacattacagacctaggcagctcatcgtggcacctagcgttaagcaccgcttacataacaatgttgcacgaaccgctttgattctgtagcataactgccagcattcaaaatggtacttctaacgaccgattaccgacaaccgctcacacagcgaaaggctgccggtactctcggaatggacgcgcgcactgaagtctattattcacgtcgtgactaccatcgacgatccttgactctttccgcccgtccactgggccgtgtggttgaagcgacgtcactcagcttgaatgtgtagtagccggccgcctgactgtaaaatacacttgtattctacagtgtcaccatgctacgaacgttgtcgtacatcacttgctgcgttcgcatcctcacgtaactcaatggaacgtacgacgaattacgtataaaatcggacagaatgcaccataacacagttttcttcactgagacagaaacatctgaccacttaacatgacttcaggcgacatactgcattggatctaggctagaatctcaggctagaaaatacagacccgagaaatatggacggacgggaaggcaaaaaaaaaactaaaaaaaactaaggatgggaccctcgcgcatgcccgacttgcaggtgttgcgcttcttttcttgcgtgatcaaa

SEQ ID NO: 97 - DNA, 2505 bp, Neospora caninum
catgctgatgaagaagggaagttcctgtaattgccggcgacagacttgtgtccgtgttagatacgcagaacctctgcttggggatgggagtcgaaggctgagcctacgtttcctatcggactgtgacctgccacgccgtcttccctgtgatgtattttcttcgtcccgacggctacgaaaatgttctgcggccacgaggccccgcagttctatcctgtgtgtgttttatttgcttgtctgaggaaaaaccctgctggacgcccatcctaacaagttgacgtgcagcttgagtggatcattttgggtgtacattcgagcacgatgttcactgctccagcttacgccggcgagcgaagaacgcaccgtattccagtcacccactagtagagaaacagccaacccggacactttccgcgcatgactcgcgtagggccgcaggccttctcgtccatcaacggcattatctttcgagaaatgaggacacaggcgtgaacagtgcttgactcgagcagtgccgctcaactgccagctcgactagtttgctatgacacgagtacgctttctttaacattttgttgcggggggctgtcttatttttttcacattcctccccccctctcaagctcatgcctaggatgctgacacaaacacaacctttttgcaagagaagatattctctaaaacagccgtatgaaagctatgagggaatctggttggcactacacttcattgccgttttgtttgtcggttccctggatgctcgtgtcgctgtatcctcaactgttaagagccacgaaatcaacaggacttatggagactgttctcgactttctacgagcgttgcttgaccgacggatatcgcctcacgaaaacatttgcaactcctccgagttatcccctgcttatccttccgcttctctcgatctccagtgtgtgctgtccattccctcacacctttctggcttcgcgtgccgttcccctgccctcttttcatcggagctactttattcgtctctctcttgctgtccgttgtccgcattcgtccagtggtctgcgggactaactactcagccgactcgatgcgcttgcgcttcgcggcgcagtctaagacatgtttggaaagtaggtgtgtttaccaggcacctagatcaaatcccaactgcccatattctgaggcagtctacgtatatacagacataggaatgcatgcagccttcggctggccaacctcgtgcacgcgtgctggctaactcagctctgcgccatggaagcaggccctcacctttccttttgcgtcgaaagcttgctgtctttcgtcgttgtccctccattccctggaagcaaaattccttcccgggtgagctgggtcctcgtattgagctatgaccagggacacagggtctccgccgccgaagaaaccatctccaggcggcgcgtgtggtccggtgtctcgccgctagctctggaggtttcattccttttggcgtttgccacggaagacagtgtgtccacaccggcggcggcaaactgtcacgacacatgttcttttgagatgcagtctcagggccggaacatctgactcctcgcgacagccccggcgcacaggagcttctccggagtccttgaatcgcgctgtccagattcgcttccacgccctcgccccgagaaaacactcagctctcgcaatcgaacggcacgaaaaaaagccaagattgcttctttgtgcggaattcgaacaccgtcgctggttttcgcctgcgcgacttctgcgctgacccacatggtgtgcatctagtcgatttccgtggcgctccgcatgcggtgcggcgggccctctcagtctacgcgcgaaacagacaaggccgagaacaaccgtcctcggatgctctgtacacaccgtcctagatgcgcaaaaatgggaaaacgaactgtttcgcgctttttgcgtgcttctacgggagccttccgtcgagtcaaatgcgacttcccgcaagaacggaaccgtagtctctcctttccttaagcctcccgcgctgtttatgtgttcaatcggcgacgcggctactttttcctcggcagccccgccggaatccaaagacacatgctggtctctttacgcgtcgcttttgttcagcatttcgtggccgtttccatctgtgtgtatatttctctaaggcgcaaggataaacgtgctcggcaatcctgctcgccgtcgcggaaagtccgcctttcctgcgcctggcgcccgcaccgtgaggacagccggcgacagcctccaagagttgcaacgaacgcgcctctcctctctttttttccctacttggcttttttgtgctcctccaccttatttcgcgacgctacgccggccatttctcgtcttccctcgcttcttcgctgcctcttcccccgttctcctgacacatcccccgctagacgcgcaacgtcagtgtgcaggctctcgcctgtcggatatcgcagttccggtctcgaagacttcaggagaga

SEQ ID NO: 98 - DNA, 2320 bp, Neospora caninum
catgtgaatatgctttaaccgtgacagcgttcgtgtaagaccgttgatacgtggcacaagaacggcccaacttggtgagatgcgctggcgaacccgttgcattcacgcgggaggcataagtcgcctggagggcgcataggagcgggaggtttgcagcgctgtgtatttcgctgccgcatgggaagttgaatccagtggtgtgaggattggcgtacacatttccgtccacgctcggtctgtaaaaagccttttcatagctagtagtgaatacgtgtccattccgcatttgcggcgcgcgtgtggttcctgcgtctgcgacagtgactttcctgtcgatccgaatacggtcaggatattgaaatccaacagggctgttgtttgattcgcgtgtttctgttcgcaccttgttcttgcatgtgggctctttcgttctttggtcgattttctcaggatccctcgactgcacagtcaagctctggagctgtaatcgtgctcagcagatggaactggcggagaaggagttgaaaggagatggacctgcgtgaagtagcgcctcccccgttcgctttaagcttttccgtcagatccacccgtttcctatgctattttcgatgcgctttcagttcgacttccctggttttcttcgaattcgcaccgtctcccaatgcaccagtcttttcacctcttttctagcatcttctgttttggggggtcgggcggcgcagggcgtcccccagtcacagtagtcggcagaggtacgcgccgcgtccacgcagaggtcttcttcctggtgggtgcatagggatgcatgtgctttttagagttgcatgcgtgtgttttcccatttgtggatatacgtacatgcatatgtgcacgcgctcgcaaatttatgggataggcattcgacaaacacaccgtaggaacgccatctgatgccaccaacggagcagtgtagagctgaatattcctgtccctcgtatgtactgaacgaaactaatctattgtcgccgcaatagcgagaaggtaacttgaggtgcacagactggagggaggcataacggaaacatttcatcagaagccttcacacggcgaaggtgcgaaaattcccgtgcctccttttttcccacatctgcgattccaaattcgtgactcccctacctcgcgcatccgttaaaggcaacgttctcaccagtacacggaagcaaacgtccgcatacacttctctttgagaagggggatcgtaaaaggccccgaaaaatcctacagttccctcgttcttcgcaccgcagccagcacaaaatgcaggaagcagagagccgcgggaagggcaagtgacatatgagatgtgtgtcgcgaactgatggcttcggcccatcttcgccgtcgtattgaacagagttttctggccacgcgaaaagcacggcgaagtgtcgcatggaaacgtctcctcggcctgtcctccaaaaggagagcctcactcaacatacgttgctcgatgggaccatgcctatttagcgagcgctacgtccttttgtcgtttctatacaccgagtcatgcttacgttccgtgtatttctgtctcactgcatactttgaatcagttcaaaagagtattcgcgctctaaatacccccccgaaaatggcgattcggacggtcctgatctcgctagcaaaaaaagtagtcgtttgctctcgagtgcaactgcctgatgtatcggtgttttagtgtgtgtctgcagcctttcccttatctcggctgtggagcctgtttgtgaaaaagagttgattcagctccatcgcgaggaaaaatcacagcggacacctgacggacgctttcgatccacttttcgtgtggcctcgtcccgggagtttcgcgcatcccccgcgtccttgcccacttgaaatccgttttttataccggcaaaacccggatacgccggagaaacagctgtgcaggggagctctaaatctcctcccacgggaaggaggccgcgaacacgccggctgctgaggaagatgtaccggtggaagttgccgagaggacgttttccgcaggaaaatgagcatcactttcttgcaaccgccgtcccggtcgtcagctaggttgtgtgtgtcaaccccagccaagcgcgacggggttagctggagcgtcgctgtctgtgcagttttttcagttcgtcatcgaccgccggaactagtagtcgtcggccatttcggtccctggtccacggtcacggggtttctccgaaaagtgtgtgctaggaccgacacccggcgtcgcgcgcgacggacagcgagtcatttccaagggttatagctc

SEQ ID NO: 99 - DNA, 1849 bp, Toxoplasma gondii
ccagaaaccaggtgttgttcttattttaggattttccggctaaccgttgtgactcactgaaccaacctgatatgggtgataagattgatcgtggagtaccgtatgaaacaatatgcctcaactgtaaacgtctttatttaaccaatttaggattcgcgcgaccgcctaaaccgtaaaaggagatggtcgcaggcctgctcaacatccagcctgtgcatcggtgaaaatgaagtgcgccacacgcgtgcacatttccgtgccaggataggcgcgatagggagtgacctgaatccattaggtatcctcctatacggtgaggaagacagttgacaaaggacctggtcgacggacactttgacggatgaagctgaggaaatggcttgtcataaccgttcaattcgggtgcgaatcccactacttgctaacgcctggttcctcctcctccaagaggatagtcccaaaatgtcgactgttgctcgtagggtgcgtttgtgtatgcgagtttcctatacgtacgcgaggagttgtacgcccgtcataattgactgaaagagagcacatcccgtacccagagcagcggcttggatacctgtgagttggaggcaagatgttacagaggtgcaactacttcgacggaaccgtcgttttttctgattccttgcattctgtgttgcaacgagacttttgaaacagggaaaccttgatgaaagacacaatatttcagtgtagaaggaatccgctgcccggcgttctgtgttagctgccaggtcagcttcccccggaacattcttgactagagtcaaataaacatatcgattcttggagtgttgagttcccaatgccaagttgcaatggattgggtaggacgtaacctttctgttcaggaactagaggccgtggcgctctgactttgccttgcggacatgatgtcagattgtcttgcctggcgcacggccatatgtattccattggtctcattgatttgtcgataaatgtccgcctcgagcctgagacccatattcattgcagtttcctccatctctcctgtccagtgctgttagctagtttctttctcatgtgatgctgagtcttgcgagtctcaggtgtgacactggggcagccgtcacggtctaatggtctccgttaagactaagagacgttaccagttcacacgccgccaggagcgccgccggaccgatgtttctcgatttaatgaaatcagtttgaatctctgggtagaacagcaatagacagcaagtcttgcgtgaggacttacgttggatatgaaaagcagtaccatacccagagattttgtcctattcgggccgactccgctgaatttagtaccgtcagtggtaggccttttaatttgtgtacgtgaaagacatagagctgaaaacatcccagaacctcacttggagtcatcgctgcttcagtgttgggcagatccgtaccaaatagtagactcctctatattcaggcttttagtattcaacttcgcgcggccccggaaaacatcggtcctagtatgccgcgcgctatcatttgtgtggcatctgcaagacccgacgctaggacgaacgcgaggacaaagaaacgagacgcagcgtagttgtgtctgcttggacacgagcaggctgtgcgtcgtttcaaacattccgagcgagtctcgtgagcagtcaactaaaatgggaaacgaagcattaaatttatcaaacatacacgataccagcttcatggtgacagttctgatgctagcgctgtgttctagagtagcgagtggctagcggaagacagtaccagccacgttagcagtccagccctgaagtgtttgtcaatgcaccactgg

SEQ ID NO: 100 - DNA, 1709 bp, Toxoplasma gondii
gaactcccgaaattcgtcaacagttacaccttctttcagcaagcccctggagttacttctcatctcactaggattccaactaccgaactttcttcacatcggatgtagggtgtaaggttcccaccttaacaccatttttttgtgcgcgtatatggttttcagcatgttcatgaaacggtctatcaaccgatctcgaaggcgacgcacggatgaaaatcaaagaaggcacggtttcatccgcaactaagaaggcctccgattttgagtacgaagccttggccgctgtgccacgtttcggcgggaaagggttattttgatattgtgctacctttctagtccggtacagttcttgaatttgtgtgtgaagcggttgtgtttccttcctcttcttatggaactggttgagaggctaggagcagcaagatgcttgggccgaggatgttaccgcttttgagttatcccagagtaggaagctaggtcccgttgacatatcgcaacgaaacggccacgctttcttcgtccttctattgccaaacggttgaaaggttactgcatgcggtcgcgtgtattatgcgtttggaaaatgtacggcgcaggttcctgtcacgattacagtacattgacatcttatgtaaggtgaatttcaccatctggtacggtgaccctcaaatagactccataattgtacagcacttgactatgtgcccatgaattgacttgggacttggaatctttgttgaatcaatgccgttagttgacgtggaacgtctagaagttgacgacggccaacgccaagaagcggacaattgtacttgcgcctatacggcgtaagagactccgaaaaggtgtggaaagttgccagtatatatttgtagtgtccgctaaatgaattcatatgaggcacaaggtgaagtgtaagttggtcccgatacctgcgggcggcccttatgaaaattgacgcacaccttaagagacatgggaaacagctcgtgttcatttgcctgttaaggctaacgcccctgtttaaggagttgccatgcgtaccccttgacactatgttgagttgtcactgcgacaccaatgctggctttcaagtttaggccaatggagccggcgaccttcaagtgtgcgttaattgaaggcgttggatggccacgcagtgatgccggaacgtcaccttaatacgtttgcgtgcccagtgacttgtctggattaaatactgcgaaaacgcaaagagtgtaacgcttcccctccgctactcgatgtgattcataacaggtgaaatgtcaggcgaatcacgctcatgattactcaatcttttaaccactgaatgccgtacagaagatgcgacagctatattaacattgtgcggcaagttccgttggttgttctgtctcatgcactgtcttgtaccgagaaacagtattcattgggttacttagtcgcctctttcgttggacgaccttgcactgtctgtggcaaccagctagggagactttgctcttacgcaactccttttactggcgcgtgaatttgctatttgacaacgaagcatttccttgaagaatgaaaaagccttatggagtttgaacacacacgcgccattgctggggtgtacaagacgtattgtatacgctggattctgatctcagttttcggctcggaaacgaggggaactgctgagacatgagtgacgccaagcaaaatct

SEQ ID NO: 101 - DNA, 8633 bp, artificial sequence
  theoretical sequence
ggaaacgcataaatctggagacaccacgaaacaaatgggccacagcagcgtcttgcagattctcgaaagatgtggaaatgagaaggaaaggcatccctacgtctccaagaggacgtgaagcgccgtgaacgacgtacaaaacctctacacgcgggcgaccggtgttgggactggggagaacgtttctctcggcagcgcagcacgccttaattgcgagagagagctgtgctgggttttttgtcgagagcggagacacgctgccttggcatttccgcgttgaaccatttccaaatccacaggcagtgaggctgtggcgcgtcctctccgtggttttgcaggtgcatgcgaaagagttctctcatcggcccattctcaattcgtcacttgtctgggcttggatcccacgactcaacttctcgcgagcggtgaggcgatgacactgcacgtggcagggaaagcggaagaaaggtgggaaacacgggtgccgcatgcgcgagctttgcgtgcatgcaggctcccgcgtaaatccaactcgccacgttcctgacgttgatcacactttttctttttgttcaactgcgacagaggaaagtgtcagtggtagagactgccgacattcctctctcgcggatgttgtaaacacctcagcaggttccctcatatatccatataattatgtcgggatgtgtgctcccaaattcatctcggcctctaaaatcggcctctttaaaatcggtacatcgctggacgtctctcggtgcatgtgaatatgctttaaccgtgacagcgttcgtgtaagaccgttgatacgtggcacaagaacggcccaacttggtgagatgcgctggcgaacccgttgcattcacgcgggaggcataagtcgcctggagggcgcataggagcgggaggtttgcagcgctgtgtatttcgctgccgcatgggaagttgaatccagtggtgtgaggattggcgtacacatttccgtccacgctcggtctgtaaaaagccttttcatagctagtagtgaatacgtgtccattccgcatttgcggcgcgcgtgtggttcctgcgtctgcgacagtgactttcctgtcgatccgaatacggtcaggatattgaaatccaacagggctgttgtttgattcgcgtgtttctgttcgcaccttgttcttgcatgtgggctctttcgttctttggtcgattttctcaggatccctcgactgcacagtcaagctctggagctgtaatcgtgctcagcagatggaactggcggagaaggagttgaaaggagatggacctgcgtgaagtagcgcctcccccgttcgctttaagcttttccgtcagatccacccgtttcctatgctattttcgatgcgctttcagttcgacttccctggttttcttcgaattcgcaccgtctcccaatgcaccagtcttttcacctcttttctagcatcttctgttttggggggtcgggcggcgcagggcgtcccccagtcacagtagtcggcagaggtacgcgccgcgtccacgcagaggtcttcttcctggtgggtgcatagggatgcatgtgctttttagagttgcatgcgtgtgttttcccatttgtggatatacgtacatgcatatgtgcacgcgctcgcaaatttatgggataggcattcgacaaacacaccgtaggaacgccatctgatgccaccaacggagcagtgtagagctgaatattcctgtccctcgtatgtactgaacgaaactaatctattgtcgccgcaatagcgagaaggtaacttgaggtgcacagactggagggaggcataacggaaacatttcatcagaagccttcacacggcgaaggtgcgaaaattcccgtgcctccttttttcccacatctgcgattccaaattcgtgactcccctacctcgcgcatccgttaaaggcaacgttctcaccagtacacggaagcaaacgtccgcatacacttctctttgagaagggggatcgtaaaaggccccgaaaaatcctacagttccctcgttcttcgcaccgcagccagcacaaaatgcaggaagcagagagccgcgggaagggcaagtgacatatgagatgtgtgtcgcgaactgatggcttcggcccatcttcgccgtcgtattgaacagagttttctggccacgcgaaaagcacggcgaagtgtcgcatggaaacgtctcctcggcctgtcctccaaaaggagagcctcactcaacatacgttgctcgatgggaccatgcctatttagcgagcgctacgtccttttgtcgtttctatacaccgagtcatgcttacgttccgtgtatttctgtctcactgcatactttgaatcagttcaaaagagtattcgcgctctaaatacccccccgaaaatggcgattcggacggtcctgatctcgctagcaaaaaaagtagtcgtttgctctcgagtgcaactgcctgatgtatcggtgttttagtgtgtgtctgcagcctttcccttatctcggctgtggagcctgtttgtgaaaaagagttgattcagctccatcgcgaggaaaaatcacagcggacacctgacggacgctttcgatccacttttcgtgtggcctcgtcccgggagtttcgcgcatcccccgcgtccttgcccacttgaaatccgttttttataccggcaaaacccggatacgccggagaaacagctgtgcaggggagctctaaatctcctcccacgggaaggaggccgcgaacacgccggctgctgaggaagatgtaccggtggaagttgccgagaggacgttttccgcaggaaaatgagcatcactttcttgcaaccgccgtcccggtcgtcagctaggttgtgtgtgtcaaccccagccaagcgcgacggggttagctggagcgtcgctgtctgtgcagttttttcagttcgtcatcgaccgccggaactagtagtcgtcggccatttcggtccctggtccacggtcacggggtttctccgaaaagtgtgtgctaggaccgacacccggcgtcgcgcgcgacggacagcgagtcatttccaagggttatagctcatcgatgaagcttataacttcgtatagtataccttatacgaagttatgatatgcatgtccgcgttcgtgaaatctctgatcaagcggagtgatcaggaatcatcgtctcagcgggatgacgttgcggagcaggccggctcgcggtgggcagtcagatgccgaaggcgtaactcaggacggcttgcgctcatcgcagaacaggggtggtgcctgcattgggtgcggttggtgatcctggttggaccggtggagatgcgcgcgcacgaaggggatgtgtcagaaacattttgtttgttctctgtgaacttttagatgtgttaaaggcggcgaatattagcagagagtcctccttgttggattctctcttgaatttcgccctttccttctctttgcgagtctcgtagagaacaagcactcgttcgccgtccctgacgacgcaacccgcgcagaagacatccaccaaacggtgttacacaatcaccttgtgtgaagttcttgcggaaaactactcgttggcattttttcttgaattccctttttcgacaaaatgcatgagaaaaaaatcactggatataccaccgttgatatatcccaatcgcatcgtaaagaacattttgaggcatttcagtcagttgctcaatgtacctataaccagaccgttcagctggatattacggcctttttaaagaccgtaaagaaaaataagcacaagttttatccggcctttattcacattcttgcccgcctgatgaatgctcatccggaattccgtatggcaatgaaagacggtgagctggtgatatgggatagtgttcacccttgttacaccgttttccatgagcaaactgaaacgttttcatcgctctggagtgaataccacgacgatttccggcagtttctacacatatattcgcaagatgtggcgtgttacggtgaaaacctggcctatttccctaaagggtttattgagaatatgtttttcgtctcagccaatccctgggtgagtttcaccagttttgatttaaacgtggccaatatggacaacttcttcgcccccgttttcaccatgggcaaatattatacgcaaggcgacaaggtgctgatgccgctggcgattcaggttcatcatgccgtctgtgatggcttccatgtcggcagaatgcttaatgaattacaacagtactgcgatgagtggcagggcggggctcctaggatggtgagcaagggcgaggagctgttcaccggggtggtgcccatcctggtcgagctggacggcgacgtaaacggccacaagttcagcgtgtccggcgagggcgagggcgatgccacctacggcaagctgaccctgaagttcatctgcaccaccggcaagctgcccgtgccctggcccaccctcgtgaccaccctgacctacggcgtgcagtgcttcagccgctaccccgaccacatgaagcagcacgacttcttcaagtccgccatgcccgaaggctacgtccaggagcgcaccatcttcttcaaggacgacggcaactacaagacccgcgccgaggtgaagttcgagggcgacaccctggtgaaccgcatcgagctgaagggcatcgacttcaaggaggacggcaacatcctggggcacaagctggagtacaactacaacagccacaacgtctatatcatggccgacaagcagaagaacggcatcaaggtgaacttcaagatccgccacaacatcgaggacggcagcgtgcagctcgccgaccactaccagcagaacacccccatcggcgacggccccgtgctgctgcccgacaaccactacctgagcacccagtccgccctgagcaaagaccccaacgagaagcgcgatcacatggtcctgctggagttcgtgaccgccgccgggatcactctcggcatggacgagctgtacaagtactcagatctcgagctcgctaggaatgcattagaggtccacacgaaccaggacccgctcgattaattaatcaccgttgtgctcacttctcaaatcgacaaaggaaacacacttcgtgcagcatgtgccccattataaagaaactgagttgttccgttgtggcttgcaggtgtcacatccacagaaaccggccgactctaaataggagtgtttcgcagcaagcagcgaaagtttatgactgggtccgaatctctgaacggatgtgtggcggacctggctgatgttgatcgccgtcgacacacgcgccacatgggtcaatacacaagacagctatcagttgttctagtcgaaccggttaacacaattcttgcccccccgagggataacttcgtatagtataccttatacgaagttatggatctagacatgctgatgaagaagggaagttcctgtaattgccggcgacagacttgtgtccgtgttagatacgcagaacctctgcttggggatgggagtcgaaggctgagcctacgtttcctatcggactgtgacctgccacgccgtcttccctgtgatgtattttcttcgtcccgacggctacgaaaatgttctgcggccacgaggccccgcagttctatcctgtgtgtgttttatttgcttgtctgaggaaaaaccctgctggacgcccatcctaacaagttgacgtgcagcttgagtggatcattttgggtgtacattcgagcacgatgttcactgctccagcttacgccggcgagcgaagaacgcaccgtattccagtcacccactagtagagaaacagccaacccggacactttccgcgcatgactcgcgtagggccgcaggccttctcgtccatcaacggcattatctttcgagaaatgaggacacaggcgtgaacagtgcttgactcgagcagtgccgctcaactgccagctcgactagtttgctatgacacgagtacgctttctttaacattttgttgcggggggctgtcttatttttttcacattcctccccccctctcaagctcatgcctaggatgctgacacaaacacaacctttttgcaagagaagatattctctaaaacagccgtatgaaagctatgagggaatctggttggcactacacttcattgccgttttgtttgtcggttccctggatgctcgtgtcgctgtatcctcaactgttaagagccacgaaatcaacaggacttatggagactgttctcgactttctacgagcgttgcttgaccgacggatatcgcctcacgaaaacatttgcaactcctccgagttatcccctgcttatccttccgcttctctcgatctccagtgtgtgctgtccattccctcacacctttctggcttcgcgtgccgttcccctgccctcttttcatcggagctactttattcgtctctctcttgctgtccgttgtccgcattcgtccagtggtctgcgggactaactactcagccgactcgatgcgcttgcgcttcgcggcgcagtctaagacatgtttggaaagtaggtgtgtttaccaggcacctagatcaaatcccaactgcccatattctgaggcagtctacgtatatacagacataggaatgcatgcagccttcggctggccaacctcgtgcacgcgtgctggctaactcagctctgcgccatggaagcaggccctcacctttccttttgcgtcgaaagcttgctgtctttcgtcgttgtccctccattccctggaagcaaaattccttcccgggtgagctgggtcctcgtattgagctatgaccagggacacagggtctccgccgccgaagaaaccatctccaggcggcgcgtgtggtccggtgtctcgccgctagctctggaggtttcattccttttggcgtttgccacggaagacagtgtgtccacaccggcggcggcaaactgtcacgacacatgttcttttgagatgcagtctcagggccggaacatctgactcctcgcgacagccccggcgcacaggagcttctccggagtccttgaatcgcgctgtccagattcgcttccacgccctcgccccgagaaaacactcagctctcgcaatcgaacggcacgaaaaaaagccaagattgcttctttgtgcggaattcgaacaccgtcgctggttttcgcctgcgcgacttctgcgctgacccacatggtgtgcatctagtcgatttccgtggcgctccgcatgcggtgcggcgggccctctcagtctacgcgcgaaacagacaaggccgagaacaaccgtcctcggatgctctgtacacaccgtcctagatgcgcaaaaatgggaaaacgaactgtttcgcgctttttgcgtgcttctacgggagccttccgtcgagtcaaatgcgacttcccgcaagaacggaaccgtagtctctcctttccttaagcctcccgcgctgtttatgtgttcaatcggcgacgcggctactttttcctcggcagccccgccggaatccaaagacacatgctggtctctttacgcgtcgcttttgttcagcatttcgtggccgtttccatctgtgtgtatatttctctaaggcgcaaggataaacgtgctcggcaatcctgctcgccgtcgcggaaagtccgcctttcctgcgcctggcgcccgcaccgtgaggacagccggcgacagcctccaagagttgcaacgaacgcgcctctcctctctttttttccctacttggcttttttgtgctcctccaccttatttcgcgacgctacgccggccatttctcgtcttccctcgcttcttcgctgcctcttcccccgttctcctgacacatcccccgctagacgcgcaacgtcagtgtgcaggctctcgcctgtcggatatcgcagttccggtctcgaagacttcaggagagaacgcagcgctcctgcgtgtccaggatacgtagcggacgcttcggaagatcggaaggagaactctgcgagaactgcacacgcctctgcagaggtgctctcgcgcgcgatccagcgttgcagagctttctaagctgaggaaggggaagaaaacggaactgacacaacgtccgaccggcgatctacgagcgagggaccagcgaggaacggccgcgaccgcgacagcagacgagtcgagcccgtccgggacgggaggtttgtttcggacagcaggaagagagatggacggctaggcgagggagaagagagtgaaagaactgtttcagcgaatctgcggagtctcgaggagagccgaaacgggaagaggaaacccaagccagggccttttctggatcacctgtaaacacggacgccgcaacacggattgccgaagcaagagagacacagttttccgagacctagagcagtcaagactgttgtgatggcatttttgctccttcccttcgcatccgccgcgatggcggggacgtcatacgatgcgtccattggcctactttccgatgcctcctttttgtcgactttggttgcctccttcttcgtcattatctgctccgagctcggcgataaggtcagtctcctcccgcgctccgtgcctctctacagcgtatccaccgtctctgctttctttcctgttcc

SEQ ID NO: 102 - DNA, 9469 bp, artificial sequence
  theoretical sequence
cagctgggctcgcaccaagcaaggcagttagtggtcccgccggaggttcaacagccctcccgtcgccgagcaagttagcaagtcctccaccaaaggacggcgagaagccaagtgacgtggcaaaaaaggctgccgtagcgtctcctccaaaggcagaaggagcagcagctgcagggagtgtaaatgccgctggtggagtcaaggcagcgaagggcccacctctagccaaaaagggccccggtcctcttggggtgaaaggaggagctcccttgcctcgtccgggggaaacaaaggaagaagcgtcatccgagtctgccactgccaaggttgctgcggatcttcctaaggggactccagtggcttcaaaaagcgctgtccctggcaaggccgcaccgctcggaccggggaaagagccccccgcaccgggagggaagacagcccctggggctcctgtgggcgggccaaaggcagaagtaaagaaggttcctccagttggcggaccaaagacagaagtaaagaaggatcctccggttggcggaccaaaggcagaagtaaagaaggttcctccggttggcggaccaaaggcagaagtaaagaaggttcctccggttggcggaccaaaggcagaagtaaagaaggttcctccggttggcggaccaaaggcagaagtgaagaaggttcctccggttggcggaccaaaggcagaagtgaagaagattcctcctggcgggcctctaggcgcaccgaaagctgacggcagcccccaagcggcacaggacggcgggactctaccgaaggccaagctcgggccaccaccagggttaggaaaagtgctgactagtgaagctgctgagagtataaaagaaacaggcccagcaaagaaaagcgctttgcccggaaaaggagtgccgccactggggaagaaggggccgccactggctgcaaaggtagaagagaaaggtggagattcaccgccagctgccgcgaaggcttcgtcaagttcggtggaccaagctgcggatcagaacgaaggagcgggagtagcaggtacacccgtaaaaaaaggaccgcctctcgggaaaggtccgccacccaaaaaagcgcccttggtggggaagaaggctcctacggctcctgaggcaccagacgccaaggtaaggtcgatcagtgagctggacaccggagcagcacgtctgaccaggctgacacatcaacgtaagttccggaagtttgtaaagaagaggcggctgacaagcatagagttcataccagtacacgagaatgcacagcgccgccttatattcgtcgggggggtcgtcctaggtccgcattgcccgctgtgcaaagccaattattatctaaatcgtttgttggttgtgtcgttgtgcggtgttgttgaccaggctgacgacgcgccaggaacggcggcgaaaaaagggccgcctaaaggcctccctcccaaaggaaaagcgccccctaagggtacgttggctagagacctgttgatgatattatcggaggatgcttgctacaagcatcggtgatatttgctttcattctcgtttagcagcacactgacagctccatggcatgcacggaggttggacagcagctgctgtcggactgggcagaaaacggggtcggttttcggtcatagagcttgcacttgttcttcgccacacgcgttgattgtagggggtacagtaaaccatgcgtagagtgctgaaaagggcgtttcaaaggtcacctagtttgcagctcgttagccggcatacgccaccaggaagttccgatattttcctctttctcttgtttgtgtccaggcaaaggatttctgtgagataccgtcgacccatgttgcaaccggcactactctagacaaataaatctgatctggtggcaagagcaggtgctacccgcaacagacgcgcatttcttctggttgctggtctgccgtgctgtgcatatagagcaaaagcacacccagcaatttgtttgttccggaatgaagctacatgagtgtatgtctgaggatcgttgtgttaacgaattcttacgggaaacaccagtagtgcccgtgttaattctccagtaaaacactacgtttcaaactctacccctcttacgcggtggcgccgttcgcccacctcccctcccgcgggagagacaacgctcggtgtccgcccgtcgctgcgagttctctgattgccttctagcgcaatagccagagcgctagaaagactgaaacaagagaagccgtctacaaacactgtagtgattgccttcgtccagaagcctcactcacattacagacctaggcagctcatcgtggcacctagcgttaagcaccgcttacataacaatgttgcacgaaccgctttgattctgtagcataactgccagcattcaaaatggtacttctaacgaccgattaccgacaaccgctcacacagcgaaaggctgccggtactctcggaatggacgcgcgcactgaagtctattattcacgtcgtgactaccatcgacgatccttgactctttccgcccgtccactgggccgtgtggttgaagcgacgtcactcagcttgaatgtgtagtagccggccgcctgactgtaaaatacacttgtattctacagtgtcaccatgctacgaacgttgtcgtacatcacttgctgcgttcgcatcctcacgtaactcaatggaacgtacgacgaattacgtataaaatcggacagaatgcaccataacacagttttcttcactgagacagaaacatctgaccacttaacatgacttcaggcgacatactgcattggatctaggctagaatctcaggctagaaaatacagacccgagaaatatggacggacgggaaggcaaaaaaaaaactaaaaaaaactaaggatgggaccctcgcgcatgcccgacttgcaggtgttgcgcttcttttcttgcgtgatcaaagcttataacttcgtataatgtatgctatacgaagttatgatatgcatgtccgcgttcgtgaaatctctgatcaagcggagtgatcaggaatcatcgtctcagcgggatgacgttgcggagcaggccggctcgcggtgggcagtcagatgccgaaggcgtaactcaggacggcttgcgctcatcgcagaacaggggtggtgcctgcattgggtgcggttggtgatcctggttggaccggtggagatgcgcgcgcacgaaggggatgtgtcagaaacattttgtttgttctctgtgaacttttagatgtgttaaaggcggcgaatattagcagagagtcctccttgttggattctctcttgaatttcgccctttccttctctttgcgagtctcgtagagaacaagcactcgttcgccgtccctgacgacgcaacccgcgcagaagacatccaccaaacggtgttacacaatcaccttgtgtgaagttcttgcggaaaactactcgttggcattttttcttgaattccctttttcgacaaaatgcatgagaaaaaaatcactggatataccaccgttgatatatcccaatcgcatcgtaaagaacattttgaggcatttcagtcagttgctcaatgtacctataaccagaccgttcagctggatattacggcctttttaaagaccgtaaagaaaaataagcacaagttttatccggcctttattcacattcttgcccgcctgatgaatgctcatccggaattccgtatggcaatgaaagacggtgagctggtgatatgggatagtgttcacccttgttacaccgttttccatgagcaaactgaaacgttttcatcgctctggagtgaataccacgacgatttccggcagtttctacacatatattcgcaagatgtggcgtgttacggtgaaaacctggcctatttccctaaagggtttattgagaatatgtttttcgtctcagccaatccctgggtgagtttcaccagttttgatttaaacgtggccaatatggacaacttcttcgcccccgttttcaccatgggcaaatattatacgcaaggcgacaaggtgctgatgccgctggcgattcaggttcatcatgccgtctgtgatggcttccatgtcggcagaatgcttaatgaattacaacagtactgcgatgagtggcagggcggggctcctaggatggtgagcaagggcgaggagctgttcaccggggtggtgcccatcctggtcgagctggacggcgacgtaaacggccacaagttcagcgtgtccggcgagggcgagggcgatgccacctacggcaagctgaccctgaagttcatctgcaccaccggcaagctgcccgtgccctggcccaccctcgtgaccaccctgacctacggcgtgcagtgcttcagccgctaccccgaccacatgaagcagcacgacttcttcaagtccgccatgcccgaaggctacgtccaggagcgcaccatcttcttcaaggacgacggcaactacaagacccgcgccgaggtgaagttcgagggcgacaccctggtgaaccgcatcgagctgaagggcatcgacttcaaggaggacggcaacatcctggggcacaagctggagtacaactacaacagccacaacgtctatatcatggccgacaagcagaagaacggcatcaaggtgaacttcaagatccgccacaacatcgaggacggcagcgtgcagctcgccgaccactaccagcagaacacccccatcggcgacggccccgtgctgctgcccgacaaccactacctgagcacccagtccgccctgagcaaagaccccaacgagaagcgcgatcacatggtcctgctggagttcgtgaccgccgccgggatcactctcggcatggacgagctgtacaagtactcagatctcgagctcgctaggaatgcattagaggtccacacgaaccaggacccgctcgattaattaatcaccgttgtgctcacttctcaaatcgacaaaggaaacacacttcgtgcagcatgtgccccattataaagaaactgagttgttccgttgtggcttgcaggtgtcacatccacagaaaccggccgactctaaataggagtgtttcgcagcaagcagcgaaagtttatgactgggtccgaatctctgaacggatgtgtggcggacctggctgatgttgatcgccgtcgacacacgcgccacatgggtcaatacacaagacagctatcagttgttctagtcgaaccggttaacacaattcttgcccccccgagggataacttcgtataatgtatgctatacgaagttatggatcccatttgtagatacggttgcacacactagtctttgagggacagactccgatcctgcggtggtatgcgtgggttcgaaccgcgattgtggcaccagcaaaacttttaccgagcgaaaactgagcgattctacaaacaatatgggctcattcctattttttttcctgttatcacaatgccagaggccgtcataagaactgcttcatcattctcacacgtggccttcactgtggctcaaaatgaattttatccattgtttaaaaactgaagctgctttcaaccggaacacggcgtgaaaaatttttttgtttctcggactacacgttcactcatatatgccactggcgtttttacttcgacgttgttgcctttacggcagaattcacagttcaccgaacccggaaatggctttcgaatactctagggtagtaaagatcgttcgaagagtcgtcgggcttggggtgacaaggtttctaaacagagttggtttagacgcgtgttgattgccacgggcagggagcaactgcctctacggtttcgtggctcttgtggtactagataaacgcctgacagaaaaactgcggttgtgtggcatgcggcacggcgggattggccttgccgaagtaacgaggggaagagtcgaagacggtcgcagaaggtggaggcatcaaaaacggtgaaaagtgtgtttgccgggaccgccgtcaaaggagagtgtaccgtttgtactggtgccgtatgaactgaaacccgagcaatcctcctattaatgcattccaaattttgagttacgataacgggccttcggcacactatggctgcgatctcactatacagtgccgagagactctcacatgttctataactcgaagtagcacgccagcatctacaaacggatgtcgatagtgtcaccagagctctggctatcgggacaaaaagttttgcttctagtggcttgttgaaccgtcttcatcattgatgatggataccgtaggtacaacaagtgccacatagtagctgctggtagttgatgccgaggaacgtgagcacgtctttcttggactctactgctgaggccactgctgatgaggtgcctgtgtatgggggaagtgtaacgcacaccgttctggcaattgcgcttgaatccacacttgaacaaccatttctgcatgcgccgtgccgcatttggcacacctgcgtagtcccttggggtacttacgacaattttagattacacacatgttgacgagcaagcgtatctccgcgagcccaccgcatggcagtgaattcgctcggcgaaagtcgcagtcgcagatacgatttttttttgttccccccagtgcggtggaaatcgtggctggtgggcgcctgcgcggcgcatgcacaccgtggaaccgcaagacattctgcaggtttcccacccgttgtcttcctctcccttcaccgccgtaatcttgcgcacacgctggccgttgacggtcgaatggagctcgcgtgatcagaagatgtgtcccagatttcttgacctggcggaatgagacgcgaaagtcgagaagagtgacctcgcaaattcagcgggctggtaaacttcagggggtgcggcgataaaaccacttacagccagtggttgcccagcaatctgacctgtccgtcactgcacttcaccgaactgaggtccccaggaagtatagttcgtttcattttctgagcggtgctgtactcaaactgactccgggaactcactttctactgtgtgttagagctgatcagtgttctgtgaccatggcaatcggacgcggcggacaggattctcgtgcgctcaacccgagaatccttttgatatcatcatggaaaagatgcacccgcccagatgaggaaacagaagaagcagagccaccactacttctcgaggatgttcgagtcaagtctgggcatctcccaacgcgctgcgagccagctaatcagcaactgctcgagatcttgcttcctcatccgtcccaaccgagcattgttgtagcatttttatgggcgaactcaacactatatgaactgaatcagttcactcgtgacatggggctgacatcggttctcctgaggtcacctgaattcgtcttggggaacggttcgcttttggcagcgacaccttttgaccctctgtttattttcctcgctctgcttcatcgccacgccgccgagttctttgtccctttctcgcagctgatttcccagtgtgagtattctcacgaggttcgcaggaacctcgcgtggctggcgtccgcgccagcagtgacgcagcgaatctccctcgttgctgacgtccgctgcgccgacagttcgaccgttgatggcccgaccctggggggagaggcagtttctacgtcgctaggcgtgcaaccaattccagagttctgccgtctgaatgtcgacaaggcgcttgcttttcttcaccggaaacacgcaaagatgctgaataccattctacgtctacgccttccattcaaggactgcgtcatccttggcgagagctcgcagtacaatccaccaccgaagggaagtgatagcggatctgcttcaaccgacacacggacccgtacacgcccactccctgcgaatggccgcctgaatccacatagagatactgtgtctccaaacgatgtgacggacaagtgcgaaatcgacatttctgctgcgagccgcctagcggaagaaatcttaagtggatatcttcccaaaggcctcgcaaccgctttgaagcaacaatgtgacaggcggaggacctcgcgaaccactaaaactgggggaagcaggagcgaaatcagctgcacacgtgcaaatgctgcagacgatagcaaactacaggacggcaccacctcgatatgtggctcaggacgcctgtttccgggtactgaagttctaagtgggagacgcccagcattttcagacgcctctgccggtcgggagaaatctctcggcgggctcctcgatggcagcgcaggtggagcgaaggaaacggagaggcccccagagagttctggaccacctgaaaggacagcggagttccccgcgggcagcaggaagcggctgcgtgctggaacttctccacgacattctgcgtacaatagctccaccgggaagagtgaatccgatacgaaggagaatctgtcgcggcaagcggaagaaagaccagacgcactgcagagtgacgagcgaggagcaacgcgcaatactgaacatagacaagctgcggaggccggaaacacgacaacttcctccaatagaaaacgtaggaaggaagacttgccgcgtcacggctcctcctctctgagaagccatgcaggaggtttggaggcggaaaatgcgctgtcgatgacaaaaaccaagggcgctaccaaagtgccaaaccaaacgttaatcagttcattcttcaggaagaaacgatgaatacgaaaatagtcaagcgaaatgtttctggcaagaatcagtatgcggattagtgaggtggtaaaaagagtgaacgcagaagctgaggaacgtgccgctctggcaggatgacgtgggcgagcatcctcctcgactggtgcctgtccaggcatgtcaaaagtggatgctcatgttatgttacacatgaggagaaccgtgtgccttgcctacgctactgcgtcattgtgctgtacgtgtagtcattgggtctccggtttgtatctagatgatgctgccatcagtgacgcttgctgttcggtaggtggtcggtaaacttgttcgtgtaggaagggaagcatcaaggtataaataggatccttgaatacgaacgtggagtagaggaggaaccgcagcaactcttggtgtgtgacgagcgtttatgttttttccaaattgcaactgcacaacgtagcagggttctgtttctgtcgaggtcatcaatggtgcaggagactgatggtagaggctttggggttgagcgtgacacgtcgcttgttttacgcgcgctaggtaaaatagatttcggctgattttacttttacatggaaaaaaaaccgcactgcggatattggacccctggagagggagaaacaagcgcgttctcatctgcacacctcatctataacgaaatgtgtcgttgcactcgtaaaccttgtggatgttgacttctgtccgccgtagag

SEQ ID NO: 103 - DNA, 7690 bp, artificial sequence
  theoretical sequence
atacgaagggattcgacgtgtgcctttttctagaggtcaacaaccgaactcacgggaaataacagcgaaagtgtccaatcgaacttcgcggctggtctcccgttccaaatgtgtaacgcggaacgggaccaatacagcagcacggaaggagcagacaggataccctggcaaactacatgagaggaacgctcgaaatttcagcggaaaaaaggaaacccacgtcgggacaatactttgtttgtcgccggctgtcagcgcggtgctcgcgtccaccggagaaaacggagttgttgcacaaagggaggactgccgagcgcggttacccatatggtccatggaaacacacctccatcgaaaccggcatgaaatctggatcaagaaccgtgacgccagttgtcatgtgtcttcggaggtcttggagggctgtcgacgagaatatacaaagcggcgcgtcgccttcgagcgtagcgcaggatgttttcaatcaagaaaaatgaagtagttccggaggccggattcaactgaactgaattctccaccggtggaaagtcgatgaaaactgcggcaagaaacagattgtgtgtccacttcgctcgacgcatggagtgtctgtacaccctccggtgactttctgttgcgcttgtctacttcgtaaaatgagcagaagctgccagtgcatgcaacgcggagaaaatcggcgactagatgcacaccatgtgggccagagatgtagaagcccgggaagaggaacgagtaccagatatttcacgcaaaaaaatctcagattcttgtttgaagccgcgtgtgaatttcggcgcgtgcgcatggacctggaagtaactctgaaaggcgcgatttcgtgggcagcaaagaagtccgggccgtgaagcactgtctcgacgcaatgctttgacaaactgagaatgcatcttttaacggatatgtgactgcccgatagtagcctgtagttggtggtcgcacactgttttctgggccaagagttaaatgctagacaacacacacagaacaagcgacgcagcgcgttggaagaaactagccgagatgacggttccgtttgctgtggagaacgttgttttacgtggaggcttcgtggctctcaagaaatcaactcactaagcaatttctatcggcactcttcttccggggagtaatggagagtggacagcaaaccagcactctgcgagggacgtagaaatgcgtagatcgatttcagtgcacaacattgctttttcgaacgcaaaaaaacacgtatttggacgcccaaaagctacgcattcacgctgggaaaaacatggagtgcattcggatgtacatagaacgcctccaaatgtgcgcggcatgtcgagaattggccgcgaggcctcacgtttgttattgtgtctcaaaaaatcccgtgaaatgtgagaggttctaggctcctcgagattccccgaaaacactgaacacgtcgggaaacggagagttgagatgcacggaagcaaagaagctatgggaaaaggaggggatgggaggagcgggcgcaatgcagcaaataagacggagagaatggaaagagcgttggagaagagaggcaagacagaaaaacggagccaggccaccgcggaaatggggcacacggcttccttctatgatgtctacacaaatacagctggtcgaatattgagcacaacgctcacaagccgtgtcaaggacccagtgaagctcgtagacaaagaaacgacgaaaagccaacaaggaagcacagtgccgaccagacttcctgccgtaggtttcagtcagatatgtgtggagtgtacaactaccctagacaaaggaagtcttgtttcagcagctttgtatgcgactgtagaaagggtagaggaataggaagaatccgatagcactgacggagacagaatgacataagaaggtatactcgactgtcacgaaaacacttgtcgaaaaattggtggaagagcactcacagaagagcaccattacgtccattcccgcatttctctcagaaattgccccggggagacgagactgtttgcgagtgcacctcagtcaaacgcagcaagtgtcggcgttggctgcttctcaagtagctgctgactcgaacgtacattttcggatcgcttgcctacagcgaaacggcgatcattgtattggagtaaacgcagcaacagatcccttgttctacaacgagcaaaatgtgtaaaggcaggcgatttccccagaggttgacaccgacaaagcaggttctcatagaatgaagaggccgcacctcctagtggcagaagcgttcttttcgtaggcacttcggcagagatgtctcacgtttgatgggttcttatttcatacatggttgggcggtttaggctttcagactcgagaaccatcagaattcaaactttgcacgcggcaaaacgcgggggtaaccatgtcgtgtgtcggtggtaattagtgaggcagtcttgctttagttggcagtgtgtcctcatgttttccctcgctgtctgcgtaaaggcacacaatctactttgttttacctgaactcggttcacaaacctaacgttctcggtacaaacccatctgtgtatccgcgtgtgagccgatcgcttcgttgcagaacttctttctaggccaaggccactattgccagcggcacaaatcgaaatattctcaatccttggcttagtgtggagactttttacttcgtgttactattgtttctcgagtcaaactctgcatcttgtctttgcgctgatctccgctctcagagactcgctgaagcttataacttcgtataatgtatgctatacgaagttatgatatgcatgtccgcgttcgtgaaatctctgatcaagcggagtgatcaggaatcatcgtctcagcgggatgacgttgcggagcaggccggctcgcggtgggcagtcagatgccgaaggcgtaactcaggacggcttgcgctcatcgcagaacaggggtggtgcctgcattgggtgcggttggtgatcctggttggaccggtggagatgcgcgcgcacgaaggggatgtgtcagaaacattttgtttgttctctgtgaacttttagatgtgttaaaggcggcgaatattagcagagagtcctccttgttggattctctcttgaatttcgccctttccttctctttgcgagtctcgtagagaacaagcactcgttcgccgtccctgacgacgcaacccgcgcagaagacatccaccaaacggtgttacacaatcaccttgtgtgaagttcttgcggaaaactactcgttggcattttttcttgaattccctttttcgacaaaatgcatgagaaaaaaatcactggatataccaccgttgatatatcccaatcgcatcgtaaagaacattttgaggcatttcagtcagttgctcaatgtacctataaccagaccgttcagctggatattacggcctttttaaagaccgtaaagaaaaataagcacaagttttatccggcctttattcacattcttgcccgcctgatgaatgctcatccggaattccgtatggcaatgaaagacggtgagctggtgatatgggatagtgttcacccttgttacaccgttttccatgagcaaactgaaacgttttcatcgctctggagtgaataccacgacgatttccggcagtttctacacatatattcgcaagatgtggcgtgttacggtgaaaacctggcctatttccctaaagggtttattgagaatatgtttttcgtctcagccaatccctgggtgagtttcaccagttttgatttaaacgtggccaatatggacaacttcttcgcccccgttttcaccatgggcaaatattatacgcaaggcgacaaggtgctgatgccgctggcgattcaggttcatcatgccgtctgtgatggcttccatgtcggcagaatgcttaatgaattacaacagtactgcgatgagtggcagggcggggctcctaggatggtgagcaagggcgaggagctgttcaccggggtggtgcccatcctggtcgagctggacggcgacgtaaacggccacaagttcagcgtgtccggcgagggcgagggcgatgccacctacggcaagctgaccctgaagttcatctgcaccaccggcaagctgcccgtgccctggcccaccctcgtgaccaccctgacctacggcgtgcagtgcttcagccgctaccccgaccacatgaagcagcacgacttcttcaagtccgccatgcccgaaggctacgtccaggagcgcaccatcttcttcaaggacgacggcaactacaagacccgcgccgaggtgaagttcgagggcgacaccctggtgaaccgcatcgagctgaagggcatcgacttcaaggaggacggcaacatcctggggcacaagctggagtacaactacaacagccacaacgtctatatcatggccgacaagcagaagaacggcatcaaggtgaacttcaagatccgccacaacatcgaggacggcagcgtgcagctcgccgaccactaccagcagaacacccccatcggcgacggccccgtgctgctgcccgacaaccactacctgagcacccagtccgccctgagcaaagaccccaacgagaagcgcgatcacatggtcctgctggagttcgtgaccgccgccgggatcactctcggcatggacgagctgtacaagtactcagatctcgagctcgctaggaatgcattagaggtccacacgaaccaggacccgctcgattaattaatcaccgttgtgctcacttctcaaatcgacaaaggaaacacacttcgtgcagcatgtgccccattataaagaaactgagttgttccgttgtggcttgcaggtgtcacatccacagaaaccggccgactctaaataggagtgtttcgcagcaagcagcgaaagtttatgactgggtccgaatctctgaacggatgtgtggcggacctggctgatgttgatcgccgtcgacacacgcgccacatgggtcaatacacaagacagctatcagttgttctagtcgaaccggttaacacaattcttgcccccccgagggataacttcgtataatgtatgctatacgaagttatggatccactagtttacgtatcgcgactagcagcaagttgagtgacagcgtgcgtcgtgcgacagggcaagtgtaccaaaagtcacatcggaggtgtaccggtgaacgaaggaggttagaaacagaagtgacacgagctagactcgaccagagagtcttttttcaccgagcaaggggacgcaatgctgctgactcgatgaacgctcttcagtcccggctggcgacgtcgagcaactggccggtcattgcgacgcgagaatgcgacgcgagaatgcgacgcgacacaccagagacccgtggtctcctatttaggtgggttccggtgacacgtctgtcgagtttttagcagcatgttgcatcacccccgtcgctcgagccattgcagagctaccaagcacgagtggttacctagcaattgaagatcgaatcacgcctgtgttgcggcgtgattgcacgactcccctaaaagcgacactgcagctcatcgagctccgtgccaatggcggggacgagggtgtgatacttgttgaccaggcgggacagcggccgctaacagtgcacagtgaggtctgatgaacacactggaaactctgtgacctttcgcgcagcaccgtcaacgacagttgtctcccgatttctgcggaggggacgcttccctgcgggcgtcgtccgtgtcgaccggcttgttttttcccgtaggagtctatggcaaaacttgacggtaggacacgattttggtgagcaaaaaatgaggccgaaggcggaaaaactcaggacgaggaaagtaggcacagtgaggccttccacaagggcactgctgccgcttttaaaaaggcgagttcaactagcttacagggaaatgattctctgccgagagcctgaatcgcaacataacgactctgaacctgatgcatttccaaaagtcgcgtgacacgcaacttcttggcacacggtgcacaccagaatcgccaccaaagagacggagcggggcttgccgccgacagaagcgacgcacacgccactcttctgcttcacatctctgtgcctctggagttgtgtgtgtcacaagcgagtgaagaagttcgcattcgttgtccagcaaaacgggacgaagccttcacttcgtgagtggagagtcgagcggccttccatgtgacctttctgttcgcccccccccccccccccactttcctccgtgtgccgccgtacctgtcatcctaggcgtggagagagagtgtgtataatgcagaagttatcggcggcattttacgttatcgtctctcatctcaaaaacgtctacactgacatctacttcctcctacgcgctgctgcgggtgtcacctaagggacatttacacgcggtgtggagtcataccaggggtgtgaaatgcagggaaaagtacggaagaagagaagactagacttctcggtcctgcgccctcactcgggggggtctgctaaactccgtccgtttcgactcctatgagccgcgcttctcaaggatttaccttccagctgtttcggagacaaaagatttgtttcctccgagaaccacatcgactagacaacaaccgatgtgaccatgggtgtcagcagatgccgtacacacggggggtaagtcgtatgcatacctcgcaagtccacacattggtgtgcttgcatccatttttgaaagcatacgcatgcacttgtatgcaccagcatgacgaccgctgtggacgccccgtgcttctctgaaaacttgtgtgaacttgtttgcttcgggatgcctctcccgaccccaaaacagaggaggtcggaggaacaaaggaaaagtacggtgagtgagcgacgatgcagggtccagaaactaggtaagtccagcgaaacgaatagaagctgaacagaaatggcaacgggaacgggcaaatttgactgggaaactcaaggcgaagacagtggacatctcgtcatgcaggtccttcacttttcttcaactgtttctcggcgagttccttctgctgagcgcgattgcagctccagagcttgactgtgcagtcgagggatcctgtacagtcgacaacaaaatacagaagcagcggaaacaacgaatgtgcgaaagagaaacatgtggaaagaaaatgtcctcgaaaaaggaggaacaacccacgcgccgtagataaaagagagactcatctatgcgcggtcactaccttacttgccaatgcagacatacggtttcttggatccgtcggcaaacctactgtgcacggacttaggtgcatgggtaaacacatgaaaagagaaaggcttatttcgaacccccagctctgcagccctgtcgcttatcggtttgccttcttcatgtgatagctgccttccacctcacatgcgggtgcttctctcatccactccgattctatcaaatttccctgtcgtcacctcaatggcctcacacatacatacagtgaaaccgaacatattcagaggcactgggaggcataatgcgatgtgccaatcttcacatgaagcaaaaagaattgttcttcccaagaggaattcgagcactcatccgcatat

SEQ ID NO: 104 - DNA, 8162 bp, artificial sequence
  theoretical sequence
taatggtgttatgtttttcgttgtcgtgtttcacagctgacaggtggtactctactccgatgcagcttcggttgcgtgcgattgcgctggaggatccgactattattaagcctactatggcagaagcggccttatatggtcttgagagggaaaagatcgccaatacgctcagtacgtctaacagtgtgactttaaacgctgcctgaaaggacttaccccttggtatgcgctgtacattagttgagtaaggctagtacatagtgctagtttttccataaggccggttcatcctgtcatcttgagcgaattggttacagcagttgaggtagccgtgacattttccatctgctccacaaacggcagcactaccgtgcgatgacgtggcttctctatcatgtgtttgacgactttggtgacagttccagatgcagacctgccgaacttaccgtctccccacgctcccgaagaggatcttgaccttacgttgagaatcagtctgtcccctgctgacatcgctgtctgcgaaaacaatggaggaatagcctctagtgctaaagcgggggcctctacggggacacctggcatgcccactcctggtagcaaggttggacaagctaaagaaactagtgcctcttctaaagtgggcatggccaaaacagttccttccccactttcgaagaccgctcctcctttaaaagcagatccaagtgagcccgtaccaaccaaggtaggcggaggttctgtcggaggacctaaagccaccccatcgccgagcaaagcaggtcctccgccaaaggacagtgacaagccgggcggcgtggcaaaaaaagcgagcccaacgccaccttcaaaggcagaaggagtagcagcttcaggaagtggagacgcccctgaggaacccaaatcagtgaaaggcgcaccactaggcaaaaagggcccgggccctctcggagtgaagggcggctctcccttaccccctccgggagatgccaagggtaaagcatcacctgaatctgccaccgccaaaggtcctgcggagcttccgaaggggcctgcgggggctgcaaaggctgcagtccctggcaaagccgcgccggtcggaccgggaaaagggcccgcggccccattagggaagaaggctcctggggaacctgtgggcaagccgaaagcagagatgaagaagagttctccaccagtgggagagccgaaggctgaagtgaagaagagccctcccccaccatcaggcagcccaaaagccgaatcgaagaagagtccctctccaccactgggcgagccgaaggcagatgtaaagaagagccctcctccaccactgggtggacctaaggcagaaatgaagaaaagtcctcccggggcgtctccagcagcaccaaaggctgacagcagcactcccgcggcaccgaccggcgccactccgccgaaggccaaactcggagcgccgccaggcaaggcgccgactgctggaactgctgagggcaaagaagcggccccagcgaagaaaggtccgttgcccgcaaaaggagcggagccactaggcaagaagggacctccaccggttgcaaaggcagaagacacaacgaaaccgccgccgccaactgcgggtcagaatgatgatgcggacggtgcaggtgtatctgccaaaaaacaatcacctctcgggaagggtccgccgccgaaaaaagggcccctgctgggaaagaagattcctccggctccggacgcacgagacgcgaaagtgaggccagtcagcgatttggacacccacacagctagcctgaccaggctgacacatcaagagatgttctaaaagatttctgaaagagggaactgggaaacgtgggattcaaccagtacactagagtgatgcttttcacaggacatttctcagggggttttacgacgtttttgctctctgctcaacgtcaaatttaacgtcagtccgcgttttggttgtgtccctccgcggtgctggtgaccaggctgacgacgcttcaccggcgaaaaaagggccacccaaaggtctccccaaaggaaaagcaccccctaagggtacgttgacaagacaaaagtatatggttaccactcgcttcttttctttagtggcactcacacttcaatacggcatgcatggaagtttaccagcgggtgatgccaaagatgcagaaaacagagacggcttttcttcgttgtatgtgcgcaagttcttcgctccccgttgtcactgtaattgcttcactgcacattagtagctcgctttatgtgcgattcacatagtcaactagttgcggcaggttgactggtaagcagcagcagccagttccgagttttacttctttctcttatttgcgtccaggcaaaggatttctttgagacgtggtcaaccccatgttgcaaccggcagtgccgcaaacaaatatgtctactctggtggcaagagacagatctactggcactcgccgatcgttccatctgggtggtggtacgcctatctgtcgatttccagcaaagacattcccagcgagctccttgttcgtgcatgaacctacatagtatgtggcttcgcatcttcctacaaacgactgtctacagggaaaatatgagcgcccgagtcatttttcgagtaaacaccagaacaaactcccctcgtgccccggcgcggttgcccccagtccctgtgtcgcgagagaagcgtccgtcactgcacctttgcagactcccgtctagcaagacctcaaatgcgctaaaaaagctcaacaagggtagccatgtacaaactctgcagttatttattgccttctaccagaagtcccatgttgcagatctctccaaaaatgtgatcgcggcatctcgtatcaaataacttttacatagagatgttgttgtaccaccaagcttgagcttgacccggctatagaatttacctgcatcgatgaagcttataacttcgtatagtataccttatacgaagttatgatatgcatgtccgcgttcgtgaaatctctgatcaagcggagtgatcaggaatcatcgtctcagcgggatgacgttgcggagcaggccggctcgcggtgggcagtcagatgccgaaggcgtaactcaggacggcttgcgctcatcgcagaacaggggtggtgcctgcattgggtgcggttggtgatcctggttggaccggtggagatgcgcgcgcacgaaggggatgtgtcagaaacattttgtttgttctctgtgaacttttagatgtgttaaaggcggcgaatattagcagagagtcctccttgttggattctctcttgaatttcgccctttccttctctttgcgagtctcgtagagaacaagcactcgttcgccgtccctgacgacgcaacccgcgcagaagacatccaccaaacggtgttacacaatcaccttgtgtgaagttcttgcggaaaactactcgttggcattttttcttgaattccctttttcgacaaaatgcatgagaaaaaaatcactggatataccaccgttgatatatcccaatcgcatcgtaaagaacattttgaggcatttcagtcagttgctcaatgtacctataaccagaccgttcagctggatattacggcctttttaaagaccgtaaagaaaaataagcacaagttttatccggcctttattcacattcttgcccgcctgatgaatgctcatccggaattccgtatggcaatgaaagacggtgagctggtgatatgggatagtgttcacccttgttacaccgttttccatgagcaaactgaaacgttttcatcgctctggagtgaataccacgacgatttccggcagtttctacacatatattcgcaagatgtggcgtgttacggtgaaaacctggcctatttccctaaagggtttattgagaatatgtttttcgtctcagccaatccctgggtgagtttcaccagttttgatttaaacgtggccaatatggacaacttcttcgcccccgttttcaccatgggcaaatattatacgcaaggcgacaaggtgctgatgccgctggcgattcaggttcatcatgccgtctgtgatggcttccatgtcggcagaatgcttaatgaattacaacagtactgcgatgagtggcagggcggggctcctaggatggtgagcaagggcgaggagctgttcaccggggtggtgcccatcctggtcgagctggacggcgacgtaaacggccacaagttcagcgtgtccggcgagggcgagggcgatgccacctacggcaagctgaccctgaagttcatctgcaccaccggcaagctgcccgtgccctggcccaccctcgtgaccaccctgacctacggcgtgcagtgcttcagccgctaccccgaccacatgaagcagcacgacttcttcaagtccgccatgcccgaaggctacgtccaggagcgcaccatcttcttcaaggacgacggcaactacaagacccgcgccgaggtgaagttcgagggcgacaccctggtgaaccgcatcgagctgaagggcatcgacttcaaggaggacggcaacatcctggggcacaagctggagtacaactacaacagccacaacgtctatatcatggccgacaagcagaagaacggcatcaaggtgaacttcaagatccgccacaacatcgaggacggcagcgtgcagctcgccgaccactaccagcagaacacccccatcggcgacggccccgtgctgctgcccgacaaccactacctgagcacccagtccgccctgagcaaagaccccaacgagaagcgcgatcacatggtcctgctggagttcgtgaccgccgccgggatcactctcggcatggacgagctgtacaagtactcagatctcgagctcgctaggaatgcattagaggtccacacgaaccaggacccgctcgattaattaatcaccgttgtgctcacttctcaaatcgacaaaggaaacacacttcgtgcagcatgtgccccattataaagaaactgagttgttccgttgtggcttgcaggtgtcacatccacagaaaccggccgactctaaataggagtgtttcgcagcaagcagcgaaagtttatgactgggtccgaatctctgaacggatgtgtggcggacctggctgatgttgatcgccgtcgacacacgcgccacatgggtcaatacacaagacagctatcagttgttctagtcgaaccggttaacacaattcttgcccccccgagggataacttcgtatagtataccttatacgaagttatggatctagaaggctctgaaaaatgttgaaaacgcatgtgtactaggttattttcgccgacttccggtggctcctccacttggttggttcactcactgtagtgcactgtaagtaagtttcgagatcaggtgaggtggaacgggaccgtctcgattgtcaaatcctacagtacttagaacagtgatttttcagatactactgcacgcagtcgtctaccagactccgattctttatagcgcgcattagtaaacggtgttttggtagccgtaaagatgtgcagtgacggaagaaaacgtcatttccacggatgacgtgaggtagagcagttccgacactagatggggacactcccggtaaacagtatcacaggtcgccgcaaaccgtgcaccttctctcttttaagctgtgacctttactcggattcaaattaattgtcttcgttttctcaaaaaacccgaagctgcaccaccggaaaacactttgaacgaaggtacccctttttctttctgtgaatacggtttcggggatttttcgacccaccgttcaagggcggacaattactgagcagcaccgacacggcctccttttttagtcaccatgtatcagagaaaaagtgactgaaggtacagctggtgagcaccactacattccgatacaaaggggtgaatgagacggcgtggcaaaattgactgtcttttatctcctgctctgtattgctttcgtttagtaatccccgtcttccactgaacgatcagtctgtactccggtggttgacacgctaatatgtgacgctggctgcttactagaaatcgcgtgttcttcagtgaaatgacctgaaacttttcattaggagtctgctttcatcgttacgcgttctagcgagtgagcctgcacaacgtccacatagtgcaggtgtggaggtggttcagtacgcgccagcagtacacatgcgaaaaaccatcggaaatattatcagaaaccggtatcactgactccctgtcgcatctgtgaccatctgactgttctgccgtaatcaaaggcggtgaaatttgatgtctcacttcaaaaacaacgacgccaggacagaaacaccaccacaggcacacagtacattttgagaggggacaccttttttgccaagaagaccgaggcgaagttccgagaacagaaatgctcactatctgtgcgcgcttatcctaaatgagttcacgacatctataaattcagatcgtttcgacgaatattaagctccctaagcaagcagaatctgccttaacgcttatcgtaggccttctgacaatcgataaacgctggtcacaacaacacgatcatctacaactattgcgctctaaattgaaatggtcaagtgcctttacttcacggaggttgtgatcacaattccaagagattctcacgtgttccttgacattaaatggcgcagccagaagctatacacggcttcgatatactttttttatcaccggcctccgtctctcgggccaaggcgcttgtcgcggctttttgaacggcctcgatttgttttatcgtggggatgcgtaagtgcggccactgtcagcgaatcgctgctgaatgttgacggcgataagcgtgagcaactcttctcctgactcttctctgaaaccactgctgatcaaagcttagtgttttcaagaatgatacggcgcaacctcggccgatttcgccacgacactgtgaactaccattgacgcttccgccgtctcgcatttagcaccgctgtctaccacatagagtaattacggcaattgtagcgcgcacgcattgagatgagaggacgtatctccaccaacccatcacgtgcgaaacaaatttgctttgcaaatattcacacttgtagataccgattgtccgtcacggggaaagtcgtagcgagggggcagcgaaccggtgcatgcacactcctcactggaggaccgcaagacaaaccccaggtttttccacagtttctttttcttgcgtcaccacagtgatattgcacacgcactttctgaactcgtgttgaccagaacagtttcacaaatgtcgacgtctagcggagtgttacgtgaatgctgagagacttgtccgacaaatttgacgtgttggtgcttttcggggtgcggtggtaaagccgtttgcagccggtgattgccctgcagttgcatatgcccgtcaccacacttcatcagactaatgccactaggtagcgttgcctgttaccttttctgagtcgcactgtgtacgaactgaccccgggaactgtgtgtctactgtatgccgtcattggtggcggttccgtaactatggcaatagaaagcggaggactgggtcctcggactctgatcccgagaattcttctgatatcatcatggcaaagaggtgcccaaccagacgagggaacgaaggaaacagaaccacaactcgttcaaggagatgctccaggcagctctgggaatctgtcctccccgcagtggaagccagctaatcaccagctgcttgagattttgctccctcatccgtcccaaccgagcgtagttgtagcctttttatggtcaaactccacattgtatgaactgaatcagtttactcgtgacgtgggactgacatcggttctccttagatcacctgagttcgtgctggggaacggggcgcttcttgcagcgacaccttttgaccctctatttattttccttgctcttctttatcgccacgccaccgagttttttgttcctttctctcagctgatttcccagtccgactattctcaggaggttcgcagaaaccttacgtggctggcatccgtaccagaagtgacgaagcgaatctccctgattgcggacatccgtagtgctggcg

SEQ ID NO: 105 - DNA, 1943 bp, Neospora caninum
gccaggagcggagagaaagcggcgcgacgcgacgcgacgcgacgcgaacctcgatcgtgccggccgcgtgtagtctcgagcacgccaagcatcacgcgcacacaaacgtgctctgcttttttgatacttttgtttttccttcaatggtctcttcacacggcctgtcagctagagcgtgttagcggcacggcgtcactccactgtgtcactcaggtagcgcacacgcgttccaggtctattaactcgattgaccctgaaagaagtttgtcgtaactggtagacgttttcgcagttcgtcactgctacagttccgtgcacgtgtttgtggtcggtgtcagtgtgtttggccttttgtattttcccttctaaacacagtcgcgaaaatgcgtggcggggcgtccgctctcgtgcaggcgctgacagtgagtggggccgtgtggatgtccccagcggaggctttgactgttcagaaatcgagtcatctagcacaattagagaacagtcagcacgtcgaaggtgttgccgaaagcctcgctctgtcgccgtcttttctggcttcaggtatctcgtctgaagtgagctacacgcttgcaaccgacgatggaacgctcatttgcgcgatctcgagtgaaggtcagccgtgccggaaccgacagttgcacaccaaccatggttacatcactggagcaagttgtcccaacggcctttgctgcagcaaaacaatgtgcggcgccggcggctgcggggaattttgctccagcagttgggtgttttgcagcacgggcctcatctatcacgcagataaaagctacggaggtgactgcagctgcgagaagcagcagcatcagtgccacaaagacgcggagtgcgtcgaagatctgaatgctggaggcagtgtgcgctgcaggtgcaaagacggcttcatgggcgatggcaagacttgtaagccggacccgtgccaaagccgagggaacgagaaatgcgggtcgaacgggtcttgcattgtcgtagatgctaatcgatacacgtgcgcgtgcggtgaaggcgaagtcctggagccgaccttagaaggcggatacagctgcaagaagacgggatgcaatgcctacagcgaatactgtaatcccggcagatgcatcgatgatgcatctcaaccgagtcgctacacatgtgaatgccctcaagactcatggagaaccactgaaggcaagaacccgatgtgttacccgacttgcgaggagatgggcgggaaggacaaatgtggacccggttcgtgccgggcaatagggaaggacaagtacgcctgcgactgtcctgcgggatactcccgttctatgacttcccagtcggaagagaaatgcgtgcaaggggccgaagcttcgttagcggaaagatgcgagaaggagctcggcatcagtttgtccgctagtaacgcgaaatgcgactgtagcaaatgcggaacggctcgataaacctcgaattttgggacaggggaatccggtgcacggaacctggtaacaggaatggacactggacactcgcactcgagcgacaagctgaaaatcgtgttcgagtgccccagtggctaccgcgcgaaataccacgcgcgcacggtttcttgcgaggaaattcccagttaggagggggcttgaacttgcgtgtacagctgacgagtgaattccttcgtaatttgctgtgcgcgaggcacagcagctttttttgatttcgcgaacgcgacatttttctcgtaatctgcgtatgtctgtaactggcctgaatgaagcaaagtggcgagctgtctacgtcttcgtagcgacctagaaaggagagcgaggaaagctatgtttagcaacaggagttcagacgaagcaggatacatgtagatatatgcacatttaccgttccgcccacgcagaggaccaaaagccgtggtgacacgctgt

SEQ ID NO: 106 - DNA, 2944 bp, Neospora caninum
ccataaagctgcagccccgcacgaatgacctcgacgcgtgatcaagtgtagtgatcgctcctcttcccttgatcacaaaatgtaatcactcccattctgtatagggagggctactaacacaaagagtcgttacaattcagattcacccggagaattatcgcctatcgtattcctaacgagcttcgctccaggattcaggccgtgaaggagaacagcttcaattgttttgcatccagaatctccgacggtgtaagcaacatatctgtttcccccaccgtttgtggcatactggaagacaacagtcacacggccgctgcttcccagtcctatcgtgagctctccgcttcccgctgcatcgtccagttccacttcgtcggaccccgactttgaggtggtgtcaaaagacaaataataatcggagaaattcaccgtgagtttgtgacatgatcccacactaacatggagttggggagagctataggtgaccatcagctgctgcccagcgtggagcattgcttgcaggctgtcaccgatgacacggatttccggaatctgtttgtaccactctgaacccccggactggtcaccttcatcaggtgagtctgtgtccccgtcctcttttgggctcggctgatcatcacctccaccaggtgtagtttcactttcatcggtcggttccgaatcatcaacgggcaacttcgtgtcacgcggttgtacgggctgccctccctcctcttctgggacgttgccgttatcatctaaacacgccgggggattctgatccctcgggaggcaaacaaggcctactggacatgctttcggcacagaggtgagtgcctggagaatcccggactcatctgtgaaatgctttttgtctagatttgtcgctgtccctgcaagtaaccgagcgccaacaggaaaaagatgccggatgagccaacgattgaaactggcttacacattctagaaaaaaaatcccagaataactgctcgactcgcatcattgtttgtttggtaaatcctgaaaaacaatccgatgcctttctcggggtgtccaggatacgagtgatgaagaagcagcgttacaggctgaagctgcacctcgtggcactatttctgctattcctgaatcttaaactcacctaatcgtcctccagggcaggaccaggttgttccgcagttactcacgcactcagaaaaaaccgaaaataataagctctcctaaaacacatcaacaacagtacgcacctcaaatctaacatttcccccactttcctcttggtgtttgtcgggaacttcgtaaaacgtatgtgaatgctatcagctagtgtaaaactgtgtgaacataactggaaaggcacagaggccgtggatctctacagttatctcgtgctcctgccctccaccgaaaacgtacatacgctatgctaaataatccctgccacctccgtggggttaatttgctgccactaacacggacgaggaccaggctcatctcttccgcgacccaggatcatgtctcctatcccccacaagaagcgatcgctgacgatgtggtgagggcagactaatgcaatctagccagctcctccttactggcttgtaacatctccatttaactggttccttgtgtccgaagcccttcgacttcctcgcaacagtcccaggatatcgtttgttgcagtagctgttggcagccgcttggaaaccactgcaatagcgcactactccttccttgattaattgggaaagctcatcatgtcgcgtagcgtgggtactattatccctatcaactccgccaggacacggtatcgaaacgccacagtcgtccacgcagctgaggacattgttttcgtcgccttcggccagaaacgccgctgaatcgtagcaccgccatacgagcttttgttggtcttttctacccaggccttgtcgtgcaactacctggttggctggaatacacatttttgaatatccgtcatcgcacagttttttaaaaacctcctggcaccatgtatcgagggccccctgtaacgaacgtgctgaggccgatggttgcgacgctgcaaaacacccgacaaatccagaaaatcagttccgtgcatcagaaggtgtcctcacagcagttcgcacgcaatgcagaacgtccgattgtatccggactaaaaacagttcgacgccttgctactatgcgaaaaggactacactgttgccaatgaatgtactacggtacctgaagaaccagcaaccgggtccactagtttcttcaatctacagttgcgagacgctccaggtggggggtgttgcaaagcaaacaaaccagctggagacttaccttctccgtatgtttttgccccagcggtaaatattaccgacaaaagcatgacgaaaaccaccgactggcccatctttgcaaatccgatgcagatcacctggagaaccaggggcacgggttaaacagctgcgtcgacctcttaacagccacgtgaaacaaaaccaaccaacgaaagcagcgattttacaagttagcacgggaaaggattgacacaatgaacgttttaaagcttccaacaacgagaggatccaataatatctgcaccgcgacgcagcaatcggtaatgtagcatcgggataggaggacgagccaacgggacacaaccacgtcggttcccgcgccggacggtaccggcggtcggctctctgtggatctcagagacgcgacaggcgaaatggcgtctcaactgccgtcagaactgtggaatgctctccggcaggtcaaaactcttgaatacactaggttcctgcgtgatttccgaatcttgccggctcgctcagttaccatttttcactcatttcagtctaccctacgtaggtgacgacatcaggccaggggtgtggaaccgacaaatttgattgtgaaataatgcgtaccatggaacgatgg

SEQ ID NO: 107 - DNA, 1435 bp, Toxoplasma gondii
ggtaccttcgtcttgcgacatacgtagtcgtgtcgtggttgccggccccgtcaagggcaaagctgtacagttacataaaggtcagtttgtgtcggttttatacagacggcgatgattgcatgcacggacagctgcgaatgggcgcattctccaatgctaaagtaaaggacagactccagctcactgcttaattttctcacacgtcacggtgtgggcatggtatcttggatggtagccactggggcacttgaagacaatattcattttttcactcaagctcccctcggatcccgattctcctttcccatggtgggaggttgcggaagcagatccggagtatccgttatcgcatttgcaggatgacgcgctgatgccgaattccttctcgcatttctcagccagcgtgacttcgactccttccacacacgactcctccgccttggaagtcacctcacgtgagtaccctgtggggcactcgcaggtgtagccattctcatgcgaggcgtcatcaatacatctaccagggctgcagttctccctgaaggcatgacatccagtcctcttgcatccttgtcccccttccgggaggttcactagagtttcgccgtcgccgcaggtgcatgtgtagctgactgaatcgacgacgatgcacgtcccgttgggtccgcacttcgcgttccctctttttgaacaaggatcctcggagcaagtcaacccagtgccgacgaagccgtctttgcacttgcagtgcacacccccacccgcgtccaagttttcgacgcattctgcgtttttgtcgcaccgatggccctgcttttcacagctgcagtctcctccatagcttttgtcaggatggtagatgagcgaactgctgcaaaaaatccagttgctggagcagaattctccgcagccgccggggccgcacatggtcttgctgcagcaagcgctcttggggcaactggccccgatgaagtacccgttgtcagtgtgcaactgacggtttcgacatggcttgccttcactcgagatagcacagagttgcgtctcctgcttgctgggggattgcacagacgagtgagtctcagtcaccgcgaaagacggagcaagactctcagagacgacttcgcggctcggcacaactttgtcaaagctgcccagctgcacagacttctgaatcggcaaagcctccgctggggtgcacatccacacggccccactgaaggtgagcgcgtgcaacagcgcggacgtcccgcctcgcatttttaccagtgttggacaaggaagttacacacagagtaaggcgcgcaaacgcgctgcactgcccacagaaatgcacagaaacgcactctcgacgagctgcgacccaccgcccgcaaacgtcttcccggaaaaggtgtgtgtgtgatggctggttcgagggaacctatcgattgcg

SEQ ID NO: 108 - DNA, 3418 bp, Toxoplasma gondii
tgaacagcccgtttactactcacgaaacactatctccaactattcacatagcgagtaactcctgattcgcccggtggggagaagcaatttgacgactaaacaggacatgactatcgccgacaagcattaacgccttccgtcggtcctctgcgtagtgtggcgctttgtggttgaagcgagacaactcgttttgaatgttgtagagccgactgaccgtataatacacttgtattttgcagcgtcaccaaacgagtgggatgatctctcgtcacttgctgcgttcgcgcccgtacgtgagatgcgtggacgtatgacaatacgtataaaactgacaggattacaccataatacattttgattcactactcaagaaacatctgaccgcgtaacaagaattcgggcaacatgctgcattaaagagataagcaagaacctcagaaagtagattcaatacaaggccccgaaatacggtgggacggcatgcaacagaaacactgagggcggaatctcgagaaagccacagttccccgtatgaagttatatccgtatgtcatagtcattacacctgcaagaactccaactctacaagaaccaggacgcatataggtgtaatagtgacgcatcttccactgttcaggaacgatctgtatctcacaaacttcatcctgattttgccgagattgtcccgttcctccacaagcatgctccaaagagtactataaatcaagcagagacggccgtaggactctcgccaagcgtcgtcaccacgagcgtcgctccactacccactccttggaaactaacctcttcacttgagctgcatccagaatcttcgaccacgtaagcagctgatcctaaagcagcattgagcctggtgtagtcgaggacaacagcgagacggcctttgtgtcccagacctatcgtaagcactgcgggtcctgctggctcttccacttctaccacatcgaacgccgaatttgagcccgtctgaaacttcaaaaatccatcaaggaaattcgcgacgagtgaatgacacgagcctacagcaacatccagtttagtggagataaacgtgagcgttagttgctgcccctcttcgagcgtcgctttcgtgctgtcaccatggatctcggttttcggcgtcttctcgggagatgttgatttctcaggcaggtctatgttaccacccttcgttggatggtccggctgagcttctcctccaggcgactgttccttaccgccacctctctcgtccgaacgatcggcgggctgttgcatctcaggcggttgtgacggtggcccaccaccagttcgtgaaatctggccactttcatctaaacacaccgggggattctcatccttcggtaggcagacttcaacttcagaacatgggctgtcgacggatccgattgcctggcgaattccttcctcttctgtataatgccgcttgtctagttctgtcgacgtccctgcaggtaacggggtgccggcaagaaaacggggaacggatgagccatcggtggaaactggtaaaagatgacttcgatggaaaaacatgaccagaaccaccccgttctccccacagaccgcactactcttgtcctggcttgatcatcaagaaaaaaattgacaacatctgtggtgtcgagcatgacagcggtaaggacgcaaaatgagaggttgcagccgcaacttgtggcgctgtttttgctttccctgcatttccaacttacctcgtcgtcctccagggcagtaccacgttgttccgcagttgctcgcacactcagcataaaccgagtacagcaagctggcctaaacagtattgacgacagcaaacaatgccaacctaacattccttccatgttcctccagtctctgcaaagaaaagcttagaatggatgtgtacactgttatctgttgtaccgctgtgaaaaaataattaaagaaaacatacacgccactagatttctgcagctcgtttcgagcgtctgcccattaactggaaaaaacgggaatgaactgcggtaaataacccctcttcacctttcgtggtgttgctttgcctcgcagttatggacggcatatcaggcttcccttttccacaagatacaaagttttctgtccccaacaagatgcatacgctgagaaggcgatggtctgaatactgatgtacgggtgcactctaacaggttcttcctcaccttctcgtaacacctccacgcaacctcgacattgtttccgaagcccttcgacctcctcgcaatggtccctggaaatttgtcgttacagtacttgttggcagatgcttgataaggactgcagaaccgttgtactccttcttcgaccaatttggacagtatctcatggcgcgttgcgtgattactgttttgccggtgtacgccgccaggacacggtatcgtgtggccacagtcgtccacgcaattaacaccgttgttttcttgattgctctccagcaaagaggctgtatcaaagcatctccattcaagtgtattttgatgagtaatgcccacggcgtttcgagctactatccggctagagggcacacacattttacgaagtccgccttggcagagttctgcagcaatctcttggcagcgttggtcaagcatctgttgtatataacgtcccgatgccggcgaatgagaatgcgacgctgaaaaaacaccgacagaatcgagagagccagttcacgtgtcgtcgctgcaatttcaccgcacgtgaaacgtccagtttcagccacagtaaactcagatagaagccttgaaaaaagaggacgactgagtgcgctcgtaccattcaaagcgagccaatggcttgcgttcccttgtccagctgactactactacgggcaaatcttgtacatcacgacagctgtgtgcattgatccaaaaaatcgtgcacccatcagtccttggtctacacccccgatatccaagaacaagagcgatgttagcgaacgaactggaaacgtaccttctccatatgcttctggcccaacgccaaataacaccggcaatagaacggtgagaaacaacgcctggcccatctttgcaaatccgttctaggtcaactacagaatcgaggcacgtgtacacagctgcatcaacagatcagcagccatgtgagacgaaaccaacacacaaaaacgcactcctgcaagctagctgacaggaaaataactaaattttctacagctttcagccggtgcgacgtctagcaacacgagaaccgcgtcgcaccaataaggaacgtaacatcgaagtgcgagtagaaggagccaggcgactggaacacccgcgtcggcgttccatgccggacgttactgttacttcggatgtcgcactagagacgccacaggaaacggtagcgacgcggcacccgctttcaggttgacgtg

SEQ ID NO: 109 - DNA, 20 bp, artificial sequence
  primer
gtgcaaagccaacttccact

SEQ ID NO: 110 - DNA, 20 bp, artificial sequence
  primer
ggacctggatcagagatcgt

SEQ ID NO: 111 - DNA, 10077 bp, artificial sequence
  plasmid
cacaagctaaagaaactagtgcctcttctaaagtgggcatggccaaaacagttccttccccactttcgaagaccgctcctcctttaaaagcagatccaagtgagcccgtaccaaccaaggtaggcggaggttctgtcggaggacctaaagccaccccatcgccgagcaaagcaggtcctccgccaaaggacagtgacaagccgggcggcgtggcaaaaaaagcgagcccaacgccaccttcaaaggcagaaggagtagcagcttcaggaagtggagacgcccctgaggaacccaaatcagtgaaaggcgcaccactaggcaaaaagggcccgggccctctcggagtgaagggcggctctcccttaccccctccgggagatgccaagggtaaagcatcacctgaatctgccaccgccaaaggtcctgcggagcttccgaaggggcctgcgggggctgcaaaggctgcagtccctggcaaagccgcgccggtcggaccgggaaaagggcccgcggccccattagggaagaaggctcctggggaacctgtgggcaagccgaaagcagagatgaagaagagttctccaccagtgggagagccgaaggctgaagtgaagaagagccctcccccaccatcaggcagcccaaaagccgaatcgaagaagagtccctctccaccactgggcgagccgaaggcagatgtaaagaagagccctcctccaccactgggtggacctaaggcagaaatgaagaaaagtcctcccggggcgtctccagcagcaccaaaggctgacagcagcactcccgcggcaccgaccggcgccactccgccgaaggccaaactcggagcgccgccaggcaaggcgccgactgctggaactgctgagggcaaagaagcggccccagcgaagaaaggtccgttgcccgcaaaaggagcggagccactaggcaagaagggacctccaccggttgcaaaggcagaagacacaacgaaaccgccgccgccaactgcgggtcagaatgatgatgcggacggtgcaggtgtatctgccaaaaaacaatcacctctcgggaagggtccgccgccgaaaaaagggcccctgctgggaaagaagattcctccggctccggacgcacgagacgcgaaagtgaggccagtcagcgatttggacacccacacagctagcctgaccaggctgacacatcaagagatgttctaaaagatttctgaaagagggaactgggaaacgtgggattcaaccagtacactagagtgatgcttttcacaggacatttctcagggggttttacgacgtttttgctctctgctcaacgtcaaatttaacgtcagtccgcgttttggttgtgtccctccgcggtgctggtgaccaggctgacgacgcttcaccggcgaaaaaagggccacccaaaggtctccccaaaggaaaagcaccccctaagggtacgttgacaagacaaaagtatatggttaccactcgcttcttttctttagtggcactcacacttcaatacggcatgcatggaagtttaccagcgggtgatgccaaagatgcagaaaacagagacggcttttcttcgttgtatgtgcgcaagttcttcgctccccgttgtcactgtaattgcttcactgcacattagtagctcgctttatgtgcgattcacatagtcaactagttgcggcaggttgactggtaagcagcagcagccagttccgagttttacttctttctcttatttgcgtccaggcaaaggatttctttgagacgtggtcaaccccatgttgcaaccggcagtgccgcaaacaaatatgtctactctggtggcaagagacagatctactggcactcgccgatcgttccatctgggtggtggtacgcctatctgtcgatttccagcaaagacattcccagcgagctccttgttcgtgcatgaacctacatagtatgtggcttcgcatcttcctacaaacgactgtctacagggaaaatatgagcgcccgagtcatttttcgagtaaacaccagaacaaactcccctcgtgccccggcgcggttgcccccagtccctgtgtcgcgagagaagcgtccgtcactgcacctttgcagactcccgtctagcaagacctcaaatgcgctaaaaaagctcaacaagggtagccatgtacaaactctgcagttatttattgccttctaccagaagtcccatgttgcagatctctccaaaaatgtgatcgcggcatctcgtatcaaataacttttacatagagatgttgttgtaccaccaagcttgagcttgacccggctatagaatttacctgcatcgatgaagcttataacttcgtatagtataccttatacgaagttatgatatgcatgtccgcgttcgtgaaatctctgatcaagcggagtgatcaggaatcatcgtctcagcgggatgacgttgcggagcaggccggctcgcggtgggcagtcagatgccgaaggcgtaactcaggacggcttgcgctcatcgcagaacaggggtggtgcctgcattgggtgcggttggtgatcctggttggaccggtggagatgcgcgcgcacgaaggggatgtgtcagaaacattttgtttgttctctgtgaacttttagatgtgttaaaggcggcgaatattagcagagagtcctccttgttggattctctcttgaatttcgccctttccttctctttgcgagtctcgtagagaacaagcactcgttcgccgtccctgacgacgcaacccgcgcagaagacatccaccaaacggtgttacacaatcaccttgtgtgaagttcttgcggaaaactactcgttggcattttttcttgaattccctttttcgacaaaatgcatgagaaaaaaatcactggatataccaccgttgatatatcccaatcgcatcgtaaagaacattttgaggcatttcagtcagttgctcaatgtacctataaccagaccgttcagctggatattacggcctttttaaagaccgtaaagaaaaataagcacaagttttatccggcctttattcacattcttgcccgcctgatgaatgctcatccggaattccgtatggcaatgaaagacggtgagctggtgatatgggatagtgttcacccttgttacaccgttttccatgagcaaactgaaacgttttcatcgctctggagtgaataccacgacgatttccggcagtttctacacatatattcgcaagatgtggcgtgttacggtgaaaacctggcctatttccctaaagggtttattgagaatatgtttttcgtctcagccaatccctgggtgagtttcaccagttttgatttaaacgtggccaatatggacaacttcttcgcccccgttttcaccatgggcaaatattatacgcaaggcgacaaggtgctgatgccgctggcgattcaggttcatcatgccgtctgtgatggcttccatgtcggcagaatgcttaatgaattacaacagtactgcgatgagtggcagggcggggctcctaggatggtgagcaagggcgaggagctgttcaccggggtggtgcccatcctggtcgagctggacggcgacgtaaacggccacaagttcagcgtgtccggcgagggcgagggcgatgccacctacggcaagctgaccctgaagttcatctgcaccaccggcaagctgcccgtgccctggcccaccctcgtgaccaccctgacctacggcgtgcagtgcttcagccgctaccccgaccacatgaagcagcacgacttcttcaagtccgccatgcccgaaggctacgtccaggagcgcaccatcttcttcaaggacgacggcaactacaagacccgcgccgaggtgaagttcgagggcgacaccctggtgaaccgcatcgagctgaagggcatcgacttcaaggaggacggcaacatcctggggcacaagctggagtacaactacaacagccacaacgtctatatcatggccgacaagcagaagaacggcatcaaggtgaacttcaagatccgccacaacatcgaggacggcagcgtgcagctcgccgaccactaccagcagaacacccccatcggcgacggccccgtgctgctgcccgacaaccactacctgagcacccagtccgccctgagcaaagaccccaacgagaagcgcgatcacatggtcctgctggagttcgtgaccgccgccgggatcactctcggcatggacgagctgtacaagtactcagatctcgagctcgctaggaatgcattagaggtccacacgaaccaggacccgctcgattaattaatcaccgttgtgctcacttctcaaatcgacaaaggaaacacacttcgtgcagcatgtgccccattataaagaaactgagttgttccgttgtggcttgcaggtgtcacatccacagaaaccggccgactctaaataggagtgtttcgcagcaagcagcgaaagtttatgactgggtccgaatctctgaacggatgtgtggcggacctggctgatgttgatcgccgtcgacacacgcgccacatgggtcaatacacaagacagctatcagttgttctagtcgaaccggttaacacaattcttgcccccccgagggataacttcgtatagtataccttatacgaagttatggatctagacatgctgatgaagaagggaagttcctgtaattgccggcgacagacttgtgtccgtgttagatacgcagaacctctgcttggggatgggagtcgaaggctgagcctacgtttcctatcggactgtgacctgccacgccgtcttccctgtgatgtattttcttcgtcccgacggctacgaaaatgttctgcggccacgaggccccgcagttctatcctgtgtgtgttttatttgcttgtctgaggaaaaaccctgctggacgcccatcctaacaagttgacgtgcagcttgagtggatcattttgggtgtacattcgagcacgatgttcactgctccagcttacgccggcgagcgaagaacgcaccgtattccagtcacccactagtagagaaacagccaacccggacactttccgcgcatgactcgcgtagggccgcaggccttctcgtccatcaacggcattatctttcgagaaatgaggacacaggcgtgaacagtgcttgactcgagcagtgccgctcaactgccagctcgactagtttgctatgacacgagtacgctttctttaacattttgttgcggggggctgtcttatttttttcacattcctccccccctctcaagctcatgcctaggatgctgacacaaacacaacctttttgcaagagaagatattctctaaaacagccgtatgaaagctatgagggaatctggttggcactacacttcattgccgttttgtttgtcggttccctggatgctcgtgtcgctgtatcctcaactgttaagagccacgaaatcaacaggacttatggagactgttctcgactttctacgagcgttgcttgaccgacggatatcgcctcacgaaaacatttgcaactcctccgagttatcccctgcttatccttccgcttctctcgatctccagtgtgtgctgtccattccctcacacctttctggcttcgcgtgccgttcccctgccctcttttcatcggagctactttattcgtctctctcttgctgtccgttgtccgcattcgtccagtggtctgcgggactaactactcagccgactcgatgcgcttgcgcttcgcggcgcagtctaagacatgtttggaaagtaggtgtgtttaccaggcacctagatcaaatcccaactgcccatattctgaggcagtctacgtatatacagacataggaatgcatgcagccttcggctggccaacctcgtgcacgcgtgctggctaactcagctctgcgccatggaagcaggccctcacctttccttttgcgtcgaaagcttgctgtctttcgtcgttgtccctccattccctggaagcaaaattccttcccgggtgagctgggtcctcgtattgagctatgaccagggacacagggtctccgccgccgaagaaaccatctccaggcggcgcgtgtggtccggtgtctcgccgctagctctggaggtttcattccttttggcgtttgccacggaagacagtgtgtccacaccggcggcggcaaactgtcacgacacatgttcttttgagatgcagtctcagggccggaacatctgactcctcgcgacagccccggcgcacaggagcttctccggagtccttgaatcgcgctgtccagattcgcttccacgccctcgccccgagaaaacactcagctctcgcaatcgaacggcacgaaaaaaagccaagattgcttctttgtgcggaattcgaacaccgtcgctggttttcgcctgcgcgacttctgcgctgacccacatggtgtgcatctagtcgatttccgtggcgctccgcatgcggtgcggcgggccctctcagtctacgcgcgaaacagacaaggccgagaacaaccgtcctcggatgctctgtacacaccgtcctagatgcgcaaaaatgggaaaacgaactgtttcgcgctttttgcgtgcttctacgggagccttccgtcgagtcaaatgcgacttcccgcaagaacggaaccgtagtctctcctttccttaagcctcccgcgctgtttatgtgttcaatcggcgacgcggctactttttcctcggcagccccgccggaatccaaagacacatgctggtctctttacgcgtcgcttttgttcagcatttcgtggccgtttccatctgtgtgtatatttctctaaggcgcaaggataaacgtgctcggcaatcctgctcgccgtcgcggaaagtccgcctttcctgcgcctggcgcccgcaccgtgaggacagccggcgacagcctccaagagttgcaacgaacgcgcctctcctctctttttttccctacttggcttttttgtgctcctccaccttatttcgcgacgctacgccggccatttctcgtcttccctcgcttcttcgctgcctcttcccccgttctcctgacacatcccccgctagacgcgcaacgtcagtgtgcaggctctcgcctgtcggatatcgcagttccggtctcgaagacttcaggagagagcggccgccaccgcggtggagctccagcttttgttccctttagtgagggttaattgcgcgcttggcgtaatcatggtcatagctgtttcctgtgtgaaattgttatccgctcacaattccacacaacatacgagccggaagcataaagtgtaaagcctggggtgcctaatgagtgagctaactcacattaattgcgttgcgctcactgcccgctttccagtcgggaaacctgtcgtgccagctgcattaatgaatcggccaacgcgcggggagaggcggtttgcgtattgggcgctcttccgcttcctcgctcactgactcgctgcgctcggtcgttcggctgcggcgagcggtatcagctcactcaaaggcggtaatacggttatccacagaatcaggggataacgcaggaaagaacatgtgagcaaaaggccagcaaaaggccaggaaccgtaaaaaggccgcgttgctggcgtttttccataggctccgcccccctgacgagcatcacaaaaatcgacgctcaagtcagaggtggcgaaacccgacaggactataaagataccaggcgtttccccctggaagctccctcgtgcgctctcctgttccgaccctgccgcttaccggatacctgtccgcctttctcccttcgggaagcgtggcgctttctcatagctcacgctgtaggtatctcagttcggtgtaggtcgttcgctccaagctgggctgtgtgcacgaaccccccgttcagcccgaccgctgcgccttatccggtaactatcgtcttgagtccaacccggtaagacacgacttatcgccactggcagcagccactggtaacaggattagcagagcgaggtatgtaggcggtgctacagagttcttgaagtggtggcctaactacggctacactagaaggacagtatttggtatctgcgctctgctgaagccagttaccttcggaaaaagagttggtagctcttgatccggcaaacaaaccaccgctggtagcggtggtttttttgtttgcaagcagcagattacgcgcagaaaaaaaggatctcaagaagatcctttgatcttttctacggggtctgacgctcagtggaacgaaaactcacgttaagggattttggtcatgagattatcaaaaaggatcttcacctagatccttttaaattaaaaatgaagttttaaatcaatctaaagtatatatgagtaaacttggtctgacagttaccaatgcttaatcagtgaggcacctatctcagcgatctgtctatttcgttcatccatagttgcctgactccccgtcgtgtagataactacgatacgggagggcttaccatctggccccagtgctgcaatgataccgcgagacccacgctcaccggctccagatttatcagcaataaaccagccagccggaagggccgagcgcagaagtggtcctgcaactttatccgcctccatccagtctattaattgttgccgggaagctagagtaagtagttcgccagttaatagtttgcgcaacgttgttgccattgctacaggcatcgtggtgtcacgctcgtcgtttggtatggcttcattcagctccggttcccaacgatcaaggcgagttacatgatcccccatgttgtgcaaaaaagcggttagctccttcggtcctccgatcgttgtcagaagtaagttggccgcagtgttatcactcatggttatggcagcactgcataattctcttactgtcatgccatccgtaagatgcttttctgtgactggtgagtactcaaccaagtcattctgagaatagtgtatgcggcgaccgagttgctcttgcccggcgtcaatacgggataataccgcgccacatagcagaactttaaaagtgctcatcattggaaaacgttcttcggggcgaaaactctcaaggatcttaccgctgttgagatccagttcgatgtaacccactcgtgcacccaactgatcttcagcatcttttactttcaccagcgtttctgggtgagcaaaaacaggaaggcaaaatgccgcaaaaaagggaataagggcgacacggaaatgttgaatactcatactcttcctttttcaatattattgaagcatttatcagggttattgtctcatgagcggatacatatttgaatgtatttagaaaaataaacaaataggggttccgcgcacatttccccgaaaagtgccacctgacgcgccctgtagcggcgcattaagcgcggcgggtgtggtggttacgcgcagcgtgaccgctacacttgccagcgccctagcgcccgctcctttcgctttcttcccttcctttctcgccacgttcgccggctttccccgtcaagctctaaatcgggggctccctttagggttccgatttagtgctttacggcacctcgaccccaaaaaacttgattagggtgatggttcacgtagtgggccatcgccctgatagacggtttttcgccctttgacgttggagtccacgttctttaatagtggactcttgttccaaactggaacaacactcaaccctatctcggtctattcttttgatttataagggattttgccgatttcggcctattggttaaaaaatgagctgatttaacaaaaatttaacgcgaattttaacaaaatattaacgcttacaatttccattcgccattcaggctgcgcaactgttgggaagggcgatcggtgcgggcctcttcgctattacgccagctggcgaaagggggatgtgctgcaaggcgattaagttgggtaacgccagggttttcccagtcacgacgttgtaaaacgacggccagtgagcgcgcgtaatacgactcactatagggcgaattgggtac

SEQ ID NO: 112 - DNA, 15017 bp, artificial sequence
  theoretical sequence
ggaacgcgaaaatgctgaggtctctctgtggtgcgagaggagtcgctgtatccctgtttccacggtttaagagctgcagagaagtacagggcctattcgtgttcagggggggacttagtgggtggtcgcgtccacgcggtggtgtagctgaagttcacgaggttgagagttgcttatttcaatgattttccttcgcaggtacaacccggatgaggcgcgcctgctgaagcagtatggcgagttgcctgccaacgccaagatcaacgaaagcgacgtcttcggagatgaagacggcggtggcggaggcatcgacttccaggacgactcggatgtctccgatgaaagttctgacgaggaagacggcaagaaggaggaaatggatattgacgacgtgagtagagagcgcagggggaggaaagggggaaaggtgtgttgagtgcatgagacagggactgaggtcgcgggtcgctgtcgattcgatttgagttgaaaggctctggatcgcgcgcgattgcaatcggacagagcgtctgtcaagaatcatagttaccatagaacaacgacagtacacgaggtcgagctcgaggaggaaaggagaaacgggaggaggatccgcagacagacactctagtggggcgcgacgctggaggtgaagagagaacacgaaggatggataaaaaatgataaaaggacagacggaaaagtgtggggggacggcaatggagctgtggataggaagtagatgcttggggttgtggtagcgagcacacacatagaggaatgagaggaacttcaactttcagacgagaaatcgattcgggaaaatgtgggtatttataagttaatatagatatacatgtacatatgagtaaatgtcaaggcctatgtgagtaaatacgcatacgcatatagtagccacccgcgccgcagggacataacggctttttcaaaaaatgcaaaaggtatgaacactgctgggttctcttccaacggcgcttttacagcagccactgtagcgctcgaacggagcatctggtctccgcagtttttaggtgtcggctttgctgtgcgattcgttcgttcgactttgacgcgtggtcttcacgtgcgtttggtgtggtgtgtgtgtgtgtgtgtgtttgcagatttgagggctttcgtcgcgttcttcccgtcttcgcaagttactgtccgtttgtttctccgtacgcgtcgaaatatgcgtgccgtctttttctcgctttgcgtttcctctgcttttcgtccttctcctaggctctcgaggagagtctgtcgtgcctgagtccgggcgacagtgggaatgttggagttgtctaggaggtctctttcttcgtgtctctttttctctttgtctctcctgacagccctgatttcccacgtccgtgtcttccttgactgcatgtggtggtgtgcactcaaacttctccgattgaggtcgtccgtgtatttgtcgccaaagctcaccgagcctctctcgcgctttgatgccgcgcgcagacgagtggttgtctgcgagaatatttttctctgtgcccacacgcattcttcgacttaggacggtacagacgcccttgtacaacctccctccaccgtcgtgtattgccaacactggtgcgtagcccggaaaaagaaaatcagagaatttcttagaaagccatcattcgggttgcctcgcttacaacacaggttcgctaaagggcatgcttcacagccgtcgttttcccgttcgcgcgaattcctctctcgcttcagtcgcggttgtagagtgccggaaactctaaagcctaggaccccctgaccccttgtctgtgccatcgcttcgcttagcttccctcgcatgacatcgaggcaattgacatcagggatttgccagaaaccaggtgttgttcttattttaggattttccggctaaccgttgtgactcactgaaccaacctgatatgggtgataagattgatcgtggagtaccgtatgaaacaatatgcctcaactgtaaacgtctttatttaaccaatttaggattcgcgcgaccgcctaaaccgtaaaaggagatggtcgcaggcctgctcaacatccagcctgtgcatcggtgaaaatgaagtgcgccacacgcgtgcacatttccgtgccaggataggcgcgatagggagtgacctgaatccattaggtatcctcctatacggtgaggaagacagttgacaaaggacctggtcgacggacactttgacggatgaagctgaggaaatggcttgtcataaccgttcaattcgggtgcgaatcccactacttgctaacgcctggttcctcctcctccaagaggatagtcccaaaatgtcgactgttgctcgtagggtgcgtttgtgtatgcgagtttcctatacgtacgcgaggagttgtacgcccgtcataattgactgaaagagagcacatcccgtacccagagcagcggcttggatacctgtgagttggaggcaagatgttacagaggtgcaactacttcgacggaaccgtcgttttttctgattccttgcattctgtgttgcaacgagacttttgaaacagggaaaccttgatgaaagacacaatatttcagtgtagaaggaatccgctgcccggcgttctgtgttagctgccaggtcagcttcccccggaacattcttgactagagtcaaataaacatatcgattcttggagtgttgagttcccaatgccaagttgcaatggattgggtaggacgtaacctttctgttcaggaactagaggccgtggcgctctgactttgccttgcggacatgatgtcagattgtcttgcctggcgcacggccatatgtattccattggtctcattgatttgtcgataaatgtccgcctcgagcctgagacccatattcattgcagtttcctccatctctcctgtccagtgctgttagctagtttctttctcatgtgatgctgagtcttgcgagtctcaggtgtgacactggggcagccgtcacggtctaatggtctccgttaagactaagagacgttaccagttcacacgccgccaggagcgccgccggaccgatgtttctcgatttaatgaaatcagtttgaatctctgggtagaacagcaatagacagcaagtcttgcgtgaggacttacgttggatatgaaaagcagtaccatacccagagattttgtcctattcgggccgactccgctgaatttagtaccgtcagtggtaggccttttaatttgtgtacgtgaaagacatagagctgaaaacatcccagaacctcacttggagtcatcgctgcttcagtgttgggcagatccgtaccaaatagtagactcctctatattcaggcttttagtattcaacttcgcgcggccccggaaaacatcggtcctagtatgccgcgcgctatcatttgtgtggcatctgcaagacccgacgctaggacgaacgcgaggacaaagaaacgagacgcagcgtagttgtgtctgcttggacacgagcaggctgtgcgtcgtttcaaacattccgagcgagtctcgtgagcagtcaactaaaatgggaaacgaagcattaaatttatcaaacatacacgataccagcttcatggtgacagttctgatgctagcgctgtgttctagagtagcgagtggctagcggaagacagtaccagccacgttagcagtccagccctgaagtgtttgtcaatgcaccactggataacttcgtataggatactttatacgaagttattgatcaggaatcatcgtctcagcgggatgacgttgcggagcaggccggctcgcggtgggcagtcagatgccgaaggcgtaactcaggacggcttgcgctcatcgcagaacaggggtggtgcctgcattgggtgcggttggtgatcctggttggaccggtggagatgcgcgcgcacgaaggggatgtgtcagaaacattttgtttgttctctgtgaacttttagatgtgttaaaggcggcgaatattagcagagagtcctccttgttggattctctcttgaatttcgccctttccttctctttgcgagtctcgtagagaacaagcactcgttcgccgtccctgacgacgcaacccgcgcagaagacatccaccaaacggtgttacacaatcaccttgtgtgaagttcttgcggaaaactactcgttggcattttttcttgaattccctttttcgacaaaatgcatgagaaaaaaatcactggatataccaccgttgatatatcccaatcgcatcgtaaagaacattttgaggcatttcagtcagttgctcaatgtacctataaccagaccgttcagctggatattacggcctttttaaagaccgtaaagaaaaataagcacaagttttatccggcctttattcacattcttgcccgcctgatgaatgctcatccggaattccgtatggcaatgaaagacggtgagctggtgatatgggatagtgttcacccttgttacaccgttttccatgagcaaactgaaacgttttcatcgctctggagtgaataccacgacgatttccggcagtttctacacatatattcgcaagatgtggcgtgttacggtgaaaacctggcctatttccctaaagggtttattgagaatatgtttttcgtctcagccaatccctgggtgagtttcaccagttttgatttaaacgtggccaatatggacaacttcttcgcccccgttttcaccatgggcaaatattatacgcaaggcgacaaggtgctgatgccgctggcgattcaggttcatcatgccgtctgtgatggcttccatgtcggcagaatgcttaatgaattacaacagtactgcgatgagtggcagggcggggctcctaggatggtgagcaagggcgaggagctgttcaccggggtggtgcccatcctggtcgagctggacggcgacgtaaacggccacaagttcagcgtgtccggcgagggcgagggcgatgccacctacggcaagctgaccctgaagttcatctgcaccaccggcaagctgcccgtgccctggcccaccctcgtgaccaccctgacctacggcgtgcagtgcttcagccgctaccccgaccacatgaagcagcacgacttcttcaagtccgccatgcccgaaggctacgtccaggagcgcaccatcttcttcaaggacgacggcaactacaagacccgcgccgaggtgaagttcgagggcgacaccctggtgaaccgcatcgagctgaagggcatcgacttcaaggaggacggcaacatcctggggcacaagctggagtacaactacaacagccacaacgtctatatcatggccgacaagcagaagaacggcatcaaggtgaacttcaagatccgccacaacatcgaggacggcagcgtgcagctcgccgaccactaccagcagaacacccccatcggcgacggccccgtgctgctgcccgacaaccactacctgagcacccagtccgccctgagcaaagaccccaacgagaagcgcgatcacatggtcctgctggagttcgtgaccgccgccgggatcactctcggcatggacgagctgtacaagtactcagatctcgagctcgctaggaatgcattagaggtccacacgaaccaggacccgctcgattaattaatcaccgttgtgctcacttctcaaatcgacaaaggaaacacacttcgtgcagcatgtgccccattataaagaaactgagttgttccgttgtggcttgcaggtgtcacatccacagaaaccggccgactctaaataggagtgtttcgcagcaagcagcgaaagtttatgactgggtccgaatctctgaacggatgtgtggcggacctggctgatgttgatcgccgtcgacacacgcgccacatgggtcaatacacaagacagctatcagttgttctagtcgaaccgataacttcgtataggatactttatacgaagttatggatccactagttgactgccacgtgtagtatcctcgttgcaaacactttttaatgatgcctctaacacgcgtatggtgtgtcatagagtattcgttcgtcctctgtgagatcattaaaaagaatcaatgcttgcctatggtacacaactgtatctgaaacagcgctctccactgtatcgcattgcagggtattattcacaacacctcagttttttttgccacagattgcttgccagtcacttctgtagacacacgctcgagcaggcggtgcgaaacctcactgttcatttttctaatcaatcatgctccgtttttccgacaattgggggagttttgaacgctggcggaatacgtgttgctacgtttggacttgtgctgggaccacttcagcacgttaatcaggggaccgtcaagcagatccttgctctagatgtgcctatgagaaggaggaactttcatgtggtgcaacggggcgtttaagctgtatcaaaagcgtcacaggaagtgctgccaaacccggaatgcttacagtacttgacaccttgaaactgtgtatgtggtgaagcggcgacgagaaaccgagagtgcttttggcttgcgcttctgagtggtgaagtggaggagccttgagctttctaggccgtggtcgctctctcgtggctttctgattcaggctggatacagcactccgtcatcgtgcctgaacgggattctccatgatccacaacagacgaggatggcagtgcacgcttattggtatcataacgtctttttcgatgaaacactggatgacgctctcaaccgccgtctcaacctctgttagaacctcctgtcggtgtaccttccgcgctggagacgctgaacattctatatgcttacaatgtgaacaaggacatcaagaattgttggctagcaaatcgacgtagagtgcagaagtcactaacgttgtagttgtgatctccagcgatttcggagcatgttatgccgcaagagggggctgacacacatacaaacacgcgttcttaataaaaatgatcaatacactggttcactgtatgccttcgcacacgggggaacaacaccgagagacatcgtgcgtcagtacgttctgaaagtgttctaaggacacatttagtgtggtcggtctccagatctccgcaatgctcttgcactgcattattcgttactgcagaatgcctgattgttgattacggtcgagcgttggattgctgattacagtcgagcgctggaatgttgattactgtcgagctcttcgtgatgacagaagcgctagctgtccaggtgcttagggcaaaatgtgtcttgtgctcgttgcgacgtgggatggtgtgcgtcgcactgagacacgctgcttcatgcctgctacttccctgcggtactattggagcgcctcttgtgtctctcgtgcgtaaccacagtggcagtttaaaacaaaatctggttcgcactgtcaatccctcgaagcctggcaagctgaattcctgtctgctctttggcggtcaccattcagtgggattggccgagattattaattttgtgtgtgaaattgcatggctttgaaacaccacataccacacaacccatccgcgtctcaagactatccgatcaagcgcgtctcgggcgcgtgtgtgttttcgtagagcagtgtgtgtcactttcctattctgtgtgcagtgccacgaggtgacgaacctgccatttgtagtcgtgttgttgtaatcgtgtattatatatatatatatatatatggtgacaactcagattacggatacaacgcagcgtacattgttatgcgacgctcgctttcaaggccaccaacttaagccgggtggtcattgtctgcagactgattccaatttatctacactgtaggtctgggtgttgctttcagccaagcagacaaagccactttgtaaaccagcattcaacaatggtgacaacaaccacgccaacgccacccggtgcgccggcagtggtgcccatcttcgacgttgtctatcaactgaatccgcacgtgtttagaagtcgcttttccaggaggaatcgcgccaggcgtgttgcgagcagcaagtcacgctcgataattcggtggcttgggtatcttacggtgctcgctgccgtcattttgctaggagcgtatgcagtaaggcgtgtatcgcgcgatctgtccgactcagtgcgggaaacacgacgaggcaggagaattacaggcagcgtacctcccgggactacccgtccccgttcagagtcttgtactggcacacaagtggacggcggctgcggcgctgacacgtcaaccgatggaaagtctgagagtgaacagaccgaaaacggggaggactcacgcttttccacccggacccctattcatgtcactgcatcgacttccccattcgcgacgcgcaaggcggcggaagaacgctcttcgagtccgagagacagaaaagttccggagggtgcccaactccccacgtcgtcgacacctcatgcacaaagaaaggactcaggtagtgatagccggaacccatctacactcataccttcaccaggtaccaacacgtttaacatgaacttttatattatcggagcaggctcttcagcgctcgattttattttcccgcacactccggatgctcaggctacagtcgtctcccccccccgcagcgcggcggccgcaccaactgtcgaaacagttccaagggttcgcacttactcgacaccaacaacattaaccctaccaacggcaccagcgaccgccactagcaaccacatgcatgcctcagcgactccctcgccaccggaacgtcctcaaaacttccgtgggggactcatgcggcaaaacggcatggttgaggggacatcgttaacgactaccgaggctgggatgccagcgccgttacaaagccctcaacacattgagacggaggcgaggttaacgtactcaaatcatctcaagagcccgcatacaccagaaactccaactgtccactcaatagaccccgttgtcggcaccagtggccattccgtagcggtgggatcgcagtctccagccggtggacctcctacagatagccgcaccccagcggcactgacccccacaagttcttctttctcacatgcagattctcttgaaacctctgagcatccgcaaagtggaccgtcgcttcatccattaatctccgggatacaagatgccgtgcaaagccaacttccactatcacaacaggagactctccctgtggtagaaaatgcgactttcttcgggccgcaacagactccaccgtggatggacgaaactgcagctgctgcaattccactcgctccctcacaaccagggtcacgtacacaacccatctcgtctccgcatactctactttcccgtagcggcggtgtgtcagctgtgccaggaccacccagaacagaaaaccctcggcaaccacaagttccaggcgaaaactcttactactctgtaccaactgagcggacgatctctgatccaggtccccaaagggcgggtgcggctcaggctgatggtatcggggctggaggcccacgggacacacaatcagcggtaactccatacccgtacgacgtcccggactacgcgtaaaaacttaaaaacttaagctgcagatatcagatctccatgggaggtccacacgaaccaggacccgctcgattaattaatcaccgttgtgctcacttctcaaatcgacaaaggaaacacacttcgtgcagcatgtgccccattataaagaaactgagttgttccgctgtggcttgcaggtgtcacatccacaaaaaccggccgactctaaataggagtgtttcgcagcaagcagcgaaagtttatgactgggtccgaatctctgaacggatgtgtggcggacctggctgatgttgatcgccgtcgacacacgcgccacatgggtcaatacacaagacagctatcagttgttttagtcgaaccggttaacacaattcttgcccccccgagaactcccgaaattcgtcaacagttacaccttctttcagcaagcccctggagttacttctcatctcactaggattccaactaccgaactttcttcacatcggatgtagggtgtaaggttcccaccttaacaccatttttttgtgcgcgtatatggttttcagcatgttcatgaaacggtctatcaaccgatctcgaaggcgacgcacggatgaaaatcaaagaaggcacggtttcatccgcaactaagaaggcctccgattttgagtacgaagccttggccgctgtgccacgtttcggcgggaaagggttattttgatattgtgctacctttctagtccggtacagttcttgaatttgtgtgtgaagcggttgtgtttccttcctcttcttatggaactggttgagaggctaggagcagcaagatgcttgggccgaggatgttaccgcttttgagttatcccagagtaggaagctaggtcccgttgacatatcgcaacgaaacggccacgctttcttcgtccttctattgccaaacggttgaaaggttactgcatgcggtcgcgtgtattatgcgtttggaaaatgtacggcgcaggttcctgtcacgattacagtacattgacatcttatgtaaggtgaatttcaccatctggtacggtgaccctcaaatagactccataattgtacagcacttgactatgtgcccatgaattgacttgggacttggaatctttgttgaatcaatgccgttagttgacgtggaacgtctagaagttgacgacggccaacgccaagaagcggacaattgtacttgcgcctatacggcgtaagagactccgaaaaggtgtggaaagttgccagtatatatttgtagtgtccgctaaatgaattcatatgaggcacaaggtgaagtgtaagttggtcccgatacctgcgggcggcccttatgaaaattgacgcacaccttaagagacatgggaaacagctcgtgttcatttgcctgttaaggctaacgcccctgtttaaggagttgccatgcgtaccccttgacactatgttgagttgtcactgcgacaccaatgctggctttcaagtttaggccaatggagccggcgaccttcaagtgtgcgttaattgaaggcgttggatggccacgcagtgatgccggaacgtcaccttaatacgtttgcgtgcccagtgacttgtctggattaaatactgcgaaaacgcaaagagtgtaacgcttcccctccgctactcgatgtgattcataacaggtgaaatgtcaggcgaatcacgctcatgattactcaatcttttaaccactgaatgccgtacagaagatgcgacagctatattaacattgtgcggcaagttccgttggttgttctgtctcatgcactgtcttgtaccgagaaacagtattcattgggttacttagtcgcctctttcgttggacgaccttgcactgtctgtggcaaccagctagggagactttgctcttacgcaactccttttactggcgcgtgaatttgctatttgacaacgaagcatttccttgaagaatgaaaaagccttatggagtttgaacacacacgcgccattgctggggtgtacaagacgtattgtatacgctggattctgatctcagttttcggctcggaaacgaggggaactgctgagacatgagtgacgccaagcaaaatctcatgccaaagaaacgactcgaagtttctgcctggcagcgtatccagtttcggtctttgttctgcgcacgttcccccctgctacgttagcggtggaaatctgcaacagagagccgcctgctttttctcgactctgtcagccgttggcacctcccattaacgctacactagacaaccatgattacgcaaggaaatcaggcgccgaattaacgtcgtttccttttcctagaagcagaatgtatatctgggcgaatgaatcgacagtagaacacaaaaatatgttaccgcacaggacaccggtgcagagtaaaagtttcgtttgcgttcatatactctaccgcctctgtgcctgcaactacctgtgaattagaaaatcttcctcgtaccgtggttgcagcaaaaaattgccgaaggaagaatttgtacttttccgttcttcatgccccactgctgactccgttctgctgcagccactgtttcctgcatcttccttcgcattcgttttccctcgcgcactttcagaagctcggtgagttacgcgtgccttccatggcacggcaaccgccacgactggagtggccgcgtgtctctgctgcgctgctgcattcaccgtttccctctctgtgttggtgttcaccattcgtctactctctgtgcatccgtttcctgcgtttaggggaaaggtccacccaccgctggcgccaccggcgggcggagaatctcggtttcccggcggtgcaattcgcacaatgatgtccggatacaaagccagagactgggtttgctcaaccgtggagttgcactcgatgtgatcgacctctggaagcagttgcgtgttttgtgctgtagaggcaaaggcgtggttactgtggctacacgattccgctcccgcgtcggtacgtctgcctccaggcaaaaaagcactatggggatttcgctgttcagcgatgctctgcgtgaatctgtcctgaggagcttgcaaagaatcaaaagctattccggtttgccgctgctgtagtgtactcgtgaaactaaagaatttaagacgcgccagatgccgttccgtacggcgaatagcctgaaagcgcaggttccgcagcacacacaccccgctgcgccttaaaagagaaacggcaatacttccgccgcgtggaatcaccacagaaaacaggcctttgcatgcactgatgcacactcgtagatatggacacacccgaccgtggacgttcacttccccggaagcgtgcaggccgggaagactgaacggaaactctcaatcgttttgaatgtaattgctgttgacaccgcagagaatgttagaaattaccatccaggttcgatgaaaatagataattgtgatcataagcacaggaaatgccttattcgaaggcgaccgaatgtcaacacagatgcacagacggaggaccgaactcttccgtacataataacatcaggagtgaggtgtgtgcacccctgcagtcttgtcgcgaaacttgagtgcatcatgcaaatgataacctacgcctacgttcataaggcatcacatttgcttcctcttccagtttccctctcggtggctccccgtataattgtcgtaatcgtggaaatacgtcaaggaaaaacacatgggcgttctcatgcaactctgcttggggacaaacacctccacataaatccacctggtaatgacaacgactgcattgcaaatatgaagaccgaagcgcttctcatacgctacatacatacatacatgcatacatacatacatgcatatatatatatatatatatatatgacaaagactgcagtgaacatttggaaacaacgcaaacggtcttcaccatgtacgcagcctacctcctgtgcatccctcaatttccgtgttcgccgatgacgtcgctctgaaccggagtcttccccgcttgagaccgaccctaccgagatgcgcacaaagatgtgaaatgagagaagacataaaaaaagagacaaagctcgcagacaataaatgcacttgagcagtgatctagcaaaccgtctctgattagtcgaggactcgctgtcgccacatgaagacactcccctccaaacgccagaacctaagtcgtgagacgagtgcgagaaacctggacccgagaaaaaagggaacaccagtgagagaacatggggacagagaggaagaagatacaccagagactcgcgaagagcagaagagcacataaaacggggaacgataaagacagaacataggtgcaaaggaagggtagagccacaacagagggtcgctaccaacatggggagcgaggaagagaaagtaagagagttcaacagagaagttgcaggaaaaaaaagcggaggagaggcagtcccagcggcgaggaccgggactgatatatgccagcaacaaagacatattatctcgagaaatgtacagctctctccctcttcgccacgtccaatcatcggtctccctcgggagcgaaacgactgagatggagacgaaatgacagcaagagatggacagaagagaagaaagaagatggagagaaacggagggaagcagatgacgcaggaaccacagaatccacacacgcccgtcgcagaaagacgcatggatacgcggacaccccgaggagcgaaacaacagaaacaagctacgtaagacactttaccttcgctttgagattttcgtcgttttctttgcgactggccgcccacacccctctcgtcctccttctgtccctgcataaacaaggaggaagaagaggaagaggaggaagaggaagaggaggaagaggaggaagaggagggagaggaagaggaggaagaggaggaatgagatctccagaggatgctgcacccttgagagcggaggacgggagggggagatgaagacaagacgttctgtctcctcgtctgtcccgcacgttctcttgtctgagattgtacggaagacgaagtaggcaagcgcgagggagcagctgtcgcctgccttcctctacttcgagaaggctgtcctcgctggcgctgaagattcaaaggcatgggagggagaggcacgcacacaggtgagacagaagacagaaagtacgaacggagacagggcaagtggaaagggacatggacggagacatcgtgagactggcaaatgaaacacaggacaaacgaagaaacgaaagcgcgacagtggcgaggcacgatgggcgaggagataagcgatgcacggtcgaggaaccgacagtcgacacacagagaaagaatatcttacagcatagagactactccacatcgact

SEQ ID NO: 113 - DNA, 5270 bp, artificial sequence
  plasmid
gatccactagttctagagcggccgccaccgcggtggagctccagcttttgttccctttagtgagggttaattgcgcgcttggcgtaatcatggtcatagctgtttcctgtgtgaaattgttatccgctcacaattccacacaacatacgagccggaagcataaagtgtaaagcctggggtgcctaatgagtgagctaactcacattaattgcgttgcgctcactgcccgctttccagtcgggaaacctgtcgtgccagctgcattaatgaatcggccaacgcgcggggagaggcggtttgcgtattgggcgctcttccgcttcctcgctcactgactcgctgcgctcggtcgttcggctgcggcgagcggtatcagctcactcaaaggcggtaatacggttatccacagaatcaggggataacgcaggaaagaacatgtgagcaaaaggccagcaaaaggccaggaaccgtaaaaaggccgcgttgctggcgtttttccataggctccgcccccctgacgagcatcacaaaaatcgacgctcaagtcagaggtggcgaaacccgacaggactataaagataccaggcgtttccccctggaagctccctcgtgcgctctcctgttccgaccctgccgcttaccggatacctgtccgcctttctcccttcgggaagcgtggcgctttctcatagctcacgctgtaggtatctcagttcggtgtaggtcgttcgctccaagctgggctgtgtgcacgaaccccccgttcagcccgaccgctgcgccttatccggtaactatcgtcttgagtccaacccggtaagacacgacttatcgccactggcagcagccactggtaacaggattagcagagcgaggtatgtaggcggtgctacagagttcttgaagtggtggcctaactacggctacactagaaggacagtatttggtatctgcgctctgctgaagccagttaccttcggaaaaagagttggtagctcttgatccggcaaacaaaccaccgctggtagcggtggtttttttgtttgcaagcagcagattacgcgcagaaaaaaaggatctcaagaagatcctttgatcttttctacggggtctgacgctcagtggaacgaaaactcacgttaagggattttggtcatgagattatcaaaaaggatcttcacctagatccttttaaattaaaaatgaagttttaaatcaatctaaagtatatatgagtaaacttggtctgacagttaccaatgcttaatcagtgaggcacctatctcagcgatctgtctatttcgttcatccatagttgcctgactccccgtcgtgtagataactacgatacgggagggcttaccatctggccccagtgctgcaatgataccgcgagacccacgctcaccggctccagatttatcagcaataaaccagccagccggaagggccgagcgcagaagtggtcctgcaactttatccgcctccatccagtctattaattgttgccgggaagctagagtaagtagttcgccagttaatagtttgcgcaacgttgttgccattgctacaggcatcgtggtgtcacgctcgtcgtttggtatggcttcattcagctccggttcccaacgatcaaggcgagttacatgatcccccatgttgtgcaaaaaagcggttagctccttcggtcctccgatcgttgtcagaagtaagttggccgcagtgttatcactcatggttatggcagcactgcataattctcttactgtcatgccatccgtaagatgcttttctgtgactggtgagtactcaaccaagtcattctgagaatagtgtatgcggcgaccgagttgctcttgcccggcgtcaatacgggataataccgcgccacatagcagaactttaaaagtgctcatcattggaaaacgttcttcggggcgaaaactctcaaggatcttaccgctgttgagatccagttcgatgtaacccactcgtgcacccaactgatcttcagcatcttttactttcaccagcgtttctgggtgagcaaaaacaggaaggcaaaatgccgcaaaaaagggaataagggcgacacggaaatgttgaatactcatactcttcctttttcaatattattgaagcatttatcagggttattgtctcatgagcggatacatatttgaatgtatttagaaaaataaacaaataggggttccgcgcacatttccccgaaaagtgccacctgacgcgccctgtagcggcgcattaagcgcggcgggtgtggtggttacgcgcagcgtgaccgctacacttgccagcgccctagcgcccgctcctttcgctttcttcccttcctttctcgccacgttcgccggctttccccgtcaagctctaaatcgggggctccctttagggttccgatttagtgctttacggcacctcgaccccaaaaaacttgattagggtgatggttcacgtagtgggccatcgccctgatagacggtttttcgccctttgacgttggagtccacgttctttaatagtggactcttgttccaaactggaacaacactcaaccctatctcggtctattcttttgatttataagggattttgccgatttcggcctattggttaaaaaatgagctgatttaacaaaaatttaacgcgaattttaacaaaatattaacgcttacaatttccattcgccattcaggctgcgcaactgttgggaagggcgatcggtgcgggcctcttcgctattacgccagctggcgaaagggggatgtgctgcaaggcgattaagttgggtaacgccagggttttcccagtcacgacgttgtaaaacgacggccagtgagcgcgcgtaatacgactcactatagggcgaattgggtaccgggccccccctcgaggtcgacggtatcgataagcttataacttcgtataatgtatgctatacgaagttatgatatgcatgtccgcgttcgtgaaatctctgatcaagcggagtgatcaggaatcatcgtctcagcgggatgacgttgcggagcaggccggctcgcggtgggcagtcagatgccgaaggcgtaactcaggacggcttgcgctcatcgcagaacaggggtggtgcctgcattgggtgcggttggtgatcctggttggaccggtggagatgcgcgcgcacgaaggggatgtgtcagaaacattttgtttgttctctgtgaacttttagatgtgttaaaggcggcgaatattagcagagagtcctccttgttggattctctcttgaatttcgccctttccttctctttgcgagtctcgtagagaacaagcactcgttcgccgtccctgacgacgcaacccgcgcagaagacatccaccaaacggtgttacacaatcaccttgtgtgaagttcttgcggaaaactactcgttggcattttttcttgaattccctttttcgacaaaatgcatgagaaaaaaatcactggatataccaccgttgatatatcccaatcgcatcgtaaagaacattttgaggcatttcagtcagttgctcaatgtacctataaccagaccgttcagctggatattacggcctttttaaagaccgtaaagaaaaataagcacaagttttatccggcctttattcacattcttgcccgcctgatgaatgctcatccggaattccgtatggcaatgaaagacggtgagctggtgatatgggatagtgttcacccttgttacaccgttttccatgagcaaactgaaacgttttcatcgctctggagtgaataccacgacgatttccggcagtttctacacatatattcgcaagatgtggcgtgttacggtgaaaacctggcctatttccctaaagggtttattgagaatatgtttttcgtctcagccaatccctgggtgagtttcaccagttttgatttaaacgtggccaatatggacaacttcttcgcccccgttttcaccatgggcaaatattatacgcaaggcgacaaggtgctgatgccgctggcgattcaggttcatcatgccgtctgtgatggcttccatgtcggcagaatgcttaatgaattacaacagtactgcgatgagtggcagggcggggctcctaggatggtgagcaagggcgaggagctgttcaccggggtggtgcccatcctggtcgagctggacggcgacgtaaacggccacaagttcagcgtgtccggcgagggcgagggcgatgccacctacggcaagctgaccctgaagttcatctgcaccaccggcaagctgcccgtgccctggcccaccctcgtgaccaccctgacctacggcgtgcagtgcttcagccgctaccccgaccacatgaagcagcacgacttcttcaagtccgccatgcccgaaggctacgtccaggagcgcaccatcttcttcaaggacgacggcaactacaagacccgcgccgaggtgaagttcgagggcgacaccctggtgaaccgcatcgagctgaagggcatcgacttcaaggaggacggcaacatcctggggcacaagctggagtacaactacaacagccacaacgtctatatcatggccgacaagcagaagaacggcatcaaggtgaacttcaagatccgccacaacatcgaggacggcagcgtgcagctcgccgaccactaccagcagaacacccccatcggcgacggccccgtgctgctgcccgacaaccactacctgagcacccagtccgccctgagcaaagaccccaacgagaagcgcgatcacatggtcctgctggagttcgtgaccgccgccgggatcactctcggcatggacgagctgtacaagtactcagatctcgagctcgctaggaatgcattagaggtccacacgaaccaggacccgctcgattaattaatcaccgttgtgctcacttctcaaatcgacaaaggaaacacacttcgtgcagcatgtgccccattataaagaaactgagttgttccgttgtggcttgcaggtgtcacatccacagaaaccggccgactctaaataggagtgtttcgcagcaagcagcgaaagtttatgactgggtccgaatctctgaacggatgtgtggcggacctggctgatgttgatcgccgtcgacacacgcgccacatgggtcaatacacaagacagctatcagttgttctagtcgaaccggttaacacaattcttgcccccccgagggataacttcgtataatgtatgctatacgaagttatg

SEQ ID NO: 114 - DNA, 33 bp, artificial sequence
  primer
cgcggtaccaggcagaagtaaagaaggttcctc

SEQ ID NO: 115 - DNA, 30 bp, artificial sequence
  primer
cgcaagctttgatcacgcaagaaaagaagc

SEQ ID NO: 116 - DNA, 32 bp, artificial sequence
  primer
cgcggatcccatttgtagatacggttgcacac

SEQ ID NO: 117 - DNA, 33 bp, artificial sequence
  primer
cgcgcggccgcacattcagacggcagaactctg

SEQ ID NO: 118 - protein, 362 aa, Neospora caninum
MRGGASALVQALTVSGAVWMSPAEALTVQKSSHLAQLENSQHVEGVAESLALSPSFLASGISSEVSYTLATDDGTLICAISSEGQPCRNRQLHTNHGYITGASCPNGLCCSKTMCGAGGCGEFCSSSWVFCSTGLIYHADKSYGGDCSCEKQQHQCHKDAECVEDLNAGGSVRCRCKDGFMGDGKTCKPDPCQSRGNEKCGSNGSCIVVDANRYTCACGEGEVLEPTLEGGYSCKKTGCNAYSEYCNPGRCIDDASQPSRYTCECPQDSWRTTEGKNPMCYPTCEEMGGKDKCGPGSCRAIGKDKYACDCPAGYSRSMTSQSEEKCVQGAEASLAERCEKELGISLSASNAKCDCSKCGTAR

SEQ ID NO: 119 - protein, 460 aa, Neospora caninum
MGQSVVFVMLLSVIFTAGAKTYGEASQPSASARSLQGALDTWCQEVFKKLCDDGYSKMCIPANQVVARQGLGRKDQQKLVWRCYDSAAFLAEGDENNVLSCVDDCGVSIPCPGGVDRDNSTHATRHDELSQLIKEGVVRYCSGFQAAANSYCNKRYPGTVARKSKGFGHKEPVKWRCYKPESLLFSVFSECVSNCGTTWSCPGGRLGTATNLDKKHFTDESGILQALTSVPKACPVGLVCLPRDQNPPACLDDNGNVPEEEGGQPVQPRDTKLPVDDSEPTDESETTPGGGDDQPSPKEDGDTDSPDEGDQSGGSEWYKQIPEIRVIGDSLQAMLHAGQQLMVTYSSPQLHVSVGSCHKLTVNFSDYYLSFDTTSKSGSDEVELDDAAGSGELTIGLGSSGRVTVVFQYATNGGGNRYVAYTVGDSGCKTIEAVLLHGLNPGAKLVRNTIGDNSPGESEL

SEQ ID NO: 120 - protein, 482 aa, artificial sequence
  fusion protein
MHEKKITGYTTVDISQSHRKEHFEAFQSVAQCTYNQTVQLDITAFLKTVKKNKHKFYPAFIHILARLMNAHPEFRMAMKDGELVIWDSVHPCYTVFHEQTETFSSLWSEYHDDFRQFLHIYSQDVACYGENLAYFPKGFIENMFFVSANPWVSFTSFDLNVANMDNFFAPVFTMGKYYTQGDKVLMPLAIQVHHAVCDGFHVGRMLNELQQYCDEWQGGAPRMVSKGEELFTGVVPILVELDGDVNGHKFSVSGEGEGDATYGKLTLKFICTTGKLPVPWPTLVTTLTYGVQCFSRYPDHMKQHDFFKSAMPEGYVQERTIFFKDDGNYKTRAEVKFEGDTLVNRIELKGIDFKEDGNILGHKLEYNYNSHNVYIMADKQKNGIKVNFKIRHNIEDGSVQLADHYQQNTPIGDGPVLLPDNHYLSTQSALSKDPNEKRDHMVLLEFVTAAGITLGMDELYKYSDLELARNALEVHTNQDPLD

SEQ ID NO: 121 - protein, 359 aa, Toxoplasma gondii
MRGGTSALLHALTFSGAVWMCTPAEALPIQKSVQLGSFDKVVPSREVVSESLAPSFAVTETHSSVQSPSKQETQLCAISSEGKPCRNRQLHTDNGYFIGASCPKSACCSKTMCGPGGCGEFCSSNWIFCSSSLIYHPDKSYGGDCSCEKQGHRCDKNAECVENLDAGGGVHCKCKDGFVGTGLTCSEDPCSKRGNAKCGPNGTCIVVDSVSYTCTCGDGETLVNLPEGGQGCKRTGCHAFRENCSPGRCIDDASHENGYTCECPTGYSREVTSKAEESCVEGVEVTLAEKCEKEFGISASSCKCDNGYSGSASATSHHGKGESGSEGSLSEKMNIVFKCPSGYHPRYHAHTVTCEKIKQ

SEQ ID NO: 122 - protein, 456 aa, Toxoplasma gondii
MGQALFLTVLLPVLFGVGPEAYGEASHSHSPASGRYIQQMLDQRCQEIAAELCQSGLRKMCVPSSRIVARNAVGITHQNTLQWRCFDTASLLESNQENNGVNCVDDCGHTIPCPGGVHRQNSNHATRHEILSKLVEEGVQRFCSPYQASANKYCNDKFPGTIARRSKGFGNNVEVAWRCYEKASLLYSVYAECASNCGTTWYCPGGRRGTSTELDKRHYTEEEGIRQAIGSVDSPCSEVEVCLPKDENPPLCLDESGQISRTGGGPPSQPPEMQQPADRSDERGGGKEQSPGGEAQPDHPTKGGNIDLPEKSTSPEKTPKTEIHGDSTKATLEEGQQLTLTFISTKLDVAVGSCHSLVANFLDGFLKFQTGSNSAFDVVEVEEPAGPAVLTIGLGHKGRLAVVLDYTRLNAALGSAAYVVEDSGCSSSEEVSFQGVGSGATLVVTTLGESPTAVSA

SEQ ID NO: 123 - protein, 559 aa, artificial sequence
  fusion protein
MVTTTTPTPPGAPAVVPIFDVVYQLNPHVFRSRFSRRNRARRVASSKSRSIIRWLGYLTVLAAVILLGAYAVRRVSRDLSDSVRETRRGRRITGSVPPGTTRPRSESCTGTQVDGGCGADTSTDGKSESEQTENGEDSRFSTRTPIHVTASTSPFATRKAAEERSSSPRDRKVPEGAQLPTSSTPHAQRKDSGSDSRNPSTLIPSPGTNTFNMNFYIIGAGSSALDFIFPHTPDAQATVVSPPRSAAAAPTVETVPRVRTYSTPTTLTLPTAPATATSNHMHASATPSPPERPQNFRGGLMRQNGMVEGTSLTTTEAGMPAPLQSPQHIETEARLTYSNHLKSPHTPETPTVHSIDPVVGTSGHSVAVGSQSPAGGPPTDSRTPAALTPTSSSFSHADSLETSEHPQSGPSLHPLISGIQDAVQSQLPLSQQETLPVVENATFFGPQQTPPWMDETAAAAIPLAPSQPGSRTQPISSPHTLLSRSGGVSAVPGPPRTENPRQPQVPGENSYYSVPTERTISDPGPQRAGAAQADGIGAGGPRDTQSAVTPYPYDVPDYA

SEQ ID NO: 124 - DNA, 36 bp, artificial sequence
  primer
cgaatttcgggagttctcgggggggcaagaattgtg

SEQ ID NO: 125 - DNA, 2828 bp, artificial sequence
  selectable marker
atgcagaaaccggtgtgtctggtcgtcgcgatgacccccaagaggggcatcggcatcaacaacggcctcccgtggccccacttgaccacagatttcaaacactttcgtcgtgtgacaaaaacgacgcccgaagaagccagtcgcctgaacgggtggcttcccaggaaatttgcaaagacgggcgactctggacttccctctccatcagtcggcaagagattcaacgccgttgtcatgggacggaaaaactgggaaagcatgcctcgaaagtttagacccctcgtggacagattgaacatcgtcgtttcctcttccctcaaagaagaagacattgcggcggagaagcctcaagctgaaggccagcagcgcgtccgagtctgtgcttcactcccagcagctctcagccttctggaggaagagtacaaggattctgtcgaccagatttttgtcgtgggaggagcgggactgtacgaggcagcgctgtctctgggcgttgcctctcacctgtacatcacgcgtgtagcccgcgagtttccgtgcgacgttttcttccctgcgttccccggagatgacattctttcaaacaaatcaactgctgcgcaggctgcagctcctgccgagtctgtgttcgttcccttttgtccggagctcggaagagagaaggacaatgaagcgacgtatcgacccatcttcatttccaagaccttctcagacaacggggtaccctacgactccgtggttctcgagaagagaaggaagactgacgacgcagccactgcggaaccgagcaacgcaatgagctccttgacgtccacgagggagacaactcccgtgcacgggttgcaggctccttcttcggccgcagccattgccccggtgttggcgtggatggacgaagaagaccggaaaaaacgcgagcaaaaggaactgattcgggccgttccgcatgttcactttagaggccatgaagaattccagtaccttgatctcattgccgacattattaacaatggaaggacaatggatgaccgaacgggcgttggtgtcatctccaaattcggctgcactatgcgctactcgctggatcaggcctttccacttctcaccacaaagcgtgtgttctggaaaggggtcctcgaagagttgctgtggttcattcgcggcgacacgaacgcaaaccatctttctgagaagggcgtgaagatctgggacaagaatgtgacacgcgagttcctcgattcgcgcaatctcccccaccgagaggtcggagacatcggcccgggctacggcttccagtggagacacttcggcgcggcatacaaagacatgcacacagactacacagggcagggcgtcgaccagctgaagaatgtgatccagatgctgagaacgaatccaacagatcgtcgcatgctcatgactgcctggaatcctgcagcgctggacgaaatggcgctgccgccttgtcacttgttgtgccagttctacgtgaacgaccagaaggagctgtcgtgcatcatgtatcagcggtcgtgcgatgtcggcctcggcgtccccttcaacatcgcttcctattcgcttttgacgctcatggttgcacacgtctgcaacctaaaacctaaggagttcattcacttcatggggaacacgcatgtctacacgaaccatgtcgaggctttaaaagagcagctgcggagagaaccgagaccgttccccattgtgaacatcctcaacaaggaacgcatcaaggaaatcgacgatttcaccgccgaggattttgaggtcgtgggctacgtcccgcacggacgaatccagatggagatggctgtcgaggtccatactaaccaggatccacttgacatggcttcgtacccctgccatcaacacgcgtctgcgttcgaccaggctgcgcgttctcgcggccataacaaccgacgtacggcgttgcgccctcgccggcaacaaaaagccacggaagtccgcctggagcagaaaatgcccacgctactgcgggtttatatagacggtccccacgggatggggaaaaccaccaccacgcaactgctggtggccctgggttcgcgcgacgatatcgtctacgtacccgagccgatgacttactggcgggtgttgggggcttccgagacaatcgcgaacatctacaccacacaacaccgcctcgaccagggtgagatatcggccggggacgcggcggtggtaatgacaagcgcccagataacaatgggcatgccttatgccgtgaccgacgccgttctggctcctcatatcgggggggaggctgggagctcacatgccccgcccccggccctcaccctcatcttcgaccgccatcccatcgccgccctcctgtgctacccggccgcgcgataccttatgggcagcatgaccccccaggccgtgctggcgttcgtggccctcatcccgccgaccttgcccggcacaaacatcgtgttgggggcccttccggaggacagacacatcgaccgcctggccaaacgccagcgccccggcgagcggcttgacctggctatgctggccgcgattcgccgcgtttatgggctgcttgccaatacggtgcggtatctgcagggcggcgggtcgtggcgggaggattggggacagctttcgggggcggccgtgccgccccagggtgccgagccccagagcaacgcgggcccacgaccccatatcggggacacgttatttaccctgtttcgggcccccgagttgctggcccccaacggcgacctgtataacgtgtttgcctgggctttggacgtcttggccaaacgcctccgtcccatgca

SEQ ID NO: 126 - DNA, 18 bp, artificial sequence
  primer
gcattcaacaatggtgac

SEQ ID NO: 127 - DNA, 36 bp, artificial sequence; identical to SEQ ID NO: 124
  primer

SEQ ID NO: 128 - DNA, 540 bp, artificial sequence
  fusion gene
aaaggtacctctagaagtatactattcgaaaaactagtatcgataagcttgaacacgcgtctcagggtgcgtggttagaacacgcgtctcagggtgcgtggttagaacacgcgtctcagggtgcgtggttggaacacgcgtgtcagggtgcgtggttggaacacgcgtctcaaggtttgtggttaagcttgcctgcattgggtgcggttggtgatcctggttggaccggtggagatgcgcgcgcacgaaggggatgtgtcagaaacattttgtttgttctctgtgaacttttagatgtgttaaaggcggcgaatattagcagagagtcctccttgttggattctctcttgaatttcgccctttccttctctttgcgagtctcgtagagaacaagcactcgttcgccgtccctgacgacgcaacccgcgcagaagacatccaccaaacggtgttacacaatcaccttgtgtgaagttcttgcggaaaactactcgttggcattttttcttgaattccctgtttaaacaaaattcttaagtt

SEQ ID NO: 129 - DNA, 674 bp, artificial sequence
  PCR product
ctgagaagggcgtgaagatctgggacaagaatgtgacacgcgagttcctcgattcgcgcaatctcccccaccgagaggtcggagacatcggcccgggctacggcttccagtggagacacttcggcgcggcatacaaagacatgcacacagactacacagggcagggcgtcgaccagctgaagaatgtgatccagatgctgagaacgaatccaacagatcgtcgcatgctcatgactgcctggaatcctgcagcgctggacgaaatggcgctgccgccttgtcacttgttgtgccagttctacgtgaacgaccagaaggagctgtcgtgcatcatgtatcagcggtcgtgcgatgtcggcctcggcgtccccttcaacatcgcttcctattcgcttttgacgctcatggttgcacacgtctgcaacctaaaacctaaggagttcattcacttcatggggaacacgcatgtctacacgaaccatgtcgaggctttaaaagagcagctgcggagagaaccgagaccgttccccattgtgaacatcctcaacaaggaacgcatcaaggaaatcgacgatttcaccgccgaggattttgaggtcgtgggctacgtcccgcacggacgaatccagatggagatggctgtcgaggtccatactaaccaggatccacttgac

SEQ ID NO: 130 - DNA, 6254 bp, artificial sequence
  plasmid
agcttcgccaggctgtaaatcccgtgagtcgtcctcacaaatcatcaagcaggtgtcctcagggagactgcctgactgagttatgctaattcctttctactttggcgtggtcacgtgtaaccatatccgaatcatttctctagccctacgaacaggtaagagcgctagggatgtccgtggagtagtgtgcttactcgataatattcagttgggactaccagcgaggcgctcgctttgctcacgcaatgcctgagacagttgcagaatgaatggtaaccgacaaacgcgttcatatgcgttttcaaacttagtagacgcgtactgtctgaaactggcggtcacaggcaccagataacgcccttggcatcggcatgtctcgtacagaggtccgtatgtagtgccacgacttctaaatccggcgacaggctggtcttttgtcttaccacgtattagcccgcgtgcgatttctcggagcgcacctgttcaacactagaaaacggagtttcctgatcgagaagccaccacctttccagaagttgaacgctagcatgtcattcgattttcaccccccgcgtagttcctgtgtgtcattcgttgtcgagacaactctgtcccgccccggtgctgttccatatgcgtgactttcccgcaattttttcagactttcaggaaagacaggctccggaacgatctcgtccatgactggtaaatccacgacaccgcaatggcccccagcacctctatctctcgtgccaggggactaacgttgtatgcgtctgcgtcttgtctttttgcattcgctttccaaaaaagagagccatccgttcccccgcacattcaacgccgcgagtgcggtttttgtcttttttgagtggtaggacgcttttcatgcgcgaactacgtggacattaagttccattctctttttcgacagcacgaaaccttgcattcaaacccgcccgcggaagatccgatcttgctgctgttcgcagtcccagtagcgtcctgtcggccgcgccgtctctgttggtgggcagccgctacacctgttatctgactgccgtgcgcgaaaatgacgccatttttgggaaaatcggggaacttcattctttaaaagtatgcggaggtttcctttttcttctgttcgtttctttttctcgggtttgataaccgtgttcgatgtaagcactttccgtctctcctccgtgctttgttcgacatcgagaccaggtgtgcagatccttcgcttgtcgatccggagacgcgtgtctcgtagaaccttttcattttaccacacggcagtgcggagcactgctctgagtgcagcagggacgggtgaagtttcgctttagtagtgcgtttctgctctacggggcgttgtcgtgtctgggaagatgcagaaaccggtgtgtctggtcgtcgcgatgacccccaagaggggcatcggcatcaacaacggcctcccgtggccccacttgaccacagatttcaaacactttcgtcgtgtgacaaaaacgacgcccgaagaagccagtcgcctgaacgggtggcttcccaggaaatttgcaaagacgggcgactctggacttccctctccatcagtcggcaagagattcaacgccgttgtcatgggacggaaaaactgggaaagcatgcctcgaaagtttagacccctcgtggacagattgaacatcgtcgtttcctcttccctcaaagaagaagacattgcggcggagaagcctcaagctgaaggccagcagcgcgtccgagtctgtgcttcactcccagcagctctcagccttctggaggaagagtacaaggattctgtcgaccagatttttgtcgtgggaggagcgggactgtacgaggcagcgctgtctctgggcgttgcctctcacctgtacatcacgcgtgtagcccgcgagtttccgtgcgacgttttcttccctgcgttccccggagatgacattctttcaaacaaatcaactgctgcgcaggctgcagctcctgccgagtctgtgttcgttcccttttgtccggagctcggaagagagaaggacaatgaagcgacgtatcgacccatcttcatttccaagaccttctcagacaacggggtaccctacgactccgtggttctcgagaagagaaggaagactgacgacgcagccactgcggaaccgagcaacgcaatgagctccttgacgtccacgagggagacaactcccgtgcacgggttgcaggctccttcttcggccgcagccattgccccggtgttggcgtggatggacgaagaagaccggaaaaaacgcgagcaaaaggaactgattcgggccgttccgcatgttcactttagaggccatgaagaattccagtaccttgatctcattgccgacattattaacaatggaaggacaatggatgaccgaacgggcgttggtgtcatctccaaattcggctgcactatgcgctactcgctggatcaggcctttccacttctcaccacaaagcgtgtgttctggaaaggggtcctcgaagagttgctgtggttcattcgcggcgacacgaacgcaaaccatctttctgagaagggcgtgaagatctgggacaagaatgtgacacgcgagttcctcgattcgcgcaatctcccccaccgagaggtcggagacatcggcccgggctacggcttccagtggagacacttcggcgcggcatacaaagacatgcacacagactacacagggcagggcgtcgaccagctgaagaatgtgatccagatgctgagaacgaatccaacagatcgtcgcatgctcatgactgcctggaatcctgcagcgctggacgaaatggcgctgccgccttgtcacttgttgtgccagttctacgtgaacgaccagaaggagctgtcgtgcatcatgtatcagcggtcgtgcgatgtcggcctcggcgtccccttcaacatcgcttcctattcgcttttgacgctcatggttgcacacgtctgcaacctaaaacctaaggagttcattcacttcatggggaacacgcatgtctacacgaaccatgtcgaggctttaaaagagcagctgcggagagaaccgagaccgttccccattgtgaacatcctcaacaaggaacgcatcaaggaaatcgacgatttcaccgccgaggattttgaggtcgtgggctacgtcccgcacggacgaatccagatggagatggctgtctagcggaaatacagaagctgcccgtctctcgttttcctctcttttcggagggatcagggagagtgcctcgggtcggagagagctgacgagggggtgccagagacccctgtgtcctttatcgaagaaaagggatgactcttcatgtggcatttcacacagtctcacctcgccttgttttctttttgtcaatcagaacgaaagcgagttgcgggtgacgcagatgtgcgtgtatccactcgtgaatgcgttatcgttctgtatgccgctagagtgctggactgttgctgtctgcccacgacagcagacaactttccttctatgcacttgcaggatgaattcctgcagcccgggggatcgatccactagttctagaggatccccgggtaccgagctcgaattcgtaatcatggtcatagctgtttcctgtgtgaaattgttatccgctcacaattccacacaacatacgagccggaagcataaagtgtaaagcctggggtgcctaatgagtgagctaactcacattaattgcgttgcgctcactgcccgctttccagtcgggaaacctgtcgtgccagctgcattaatgaatcggccaacgcgcggggagaggcggtttgcgtattgggcgctcttccgcttcctcgctcactgactcgctgcgctcggtcgttcggctgcggcgagcggtatcagctcactcaaaggcggtaatacggttatccacagaatcaggggataacgcaggaaagaacatgtgagcaaaaggccagcaaaaggccaggaaccgtaaaaaggccgcgttgctggcgtttttccataggctccgcccccctgacgagcatcacaaaaatcgacgctcaagtcagaggtggcgaaacccgacaggactataaagataccaggcgtttccccctggaagctccctcgtgcgctctcctgttccgaccctgccgcttaccggatacctgtccgcctttctcccttcgggaagcgtggcgctttctcaaagctcacgctgtaggtatctcagttcggtgtaggtcgttcgctccaagctgggctgtgtgcacgaaccccccgttcagcccgaccgctgcgccttatccggtaactatcgtcttgagtccaacccggtaagacacgacttatcgccactggcagcagccactggtaacaggattagcagagcgaggtatgtaggcggtgctacagagttcttgaagtggtggcctaactacggctacactagaagaacagtatttggtatctgcgctctgctgaagccagttaccttcggaaaaagagttggtagctcttgatccggcaaacaaaccaccgctggtagcggtggtttttttgtttgcaagcagcagattacgcgcagaaaaaaaggatctcaagaagatcctttgatcttttctacggggtctgacgctcagtggaacgaaaactcacgttaagggattttggtcatgagattatcaaaaaggatcttcacctagatccttttaaattaaaaatgaagttttaaatcaatctaaagtatatatgagtaaacttggtctgacagttaccaatgcttaatcagtgaggcacctatctcagcgatctgtctatttcgttcatccatagttgcctgactccccgtcgtgtagataactacgatacgggagggcttaccatctggccccagtgctgcaatgataccgcgagacccacgctcaccggctccagatttatcagcaataaaccagccagccggaagggccgagcgcagaagtggtcctgcaactttatccgcctccatccagtctattaattgttgccgggaagctagagtaagtagttcgccagttaatagtttgcgcaacgttgttgccattgctacaggcatcgtggtgtcacgctcgtcgtttggtatggcttcattcagctccggttcccaacgatcaaggcgagttacatgatcccccatgttgtgcaaaaaagcggttagctccttcggtcctccgatcgttgtcagaagtaagttggccgcagtgttatcactcatggttatggcagcactgcataattctcttactgtcatgccatccgtaagatgcttttctgtgactggtgagtactcaaccaagtcattctgagaatagtgtatgcggcgaccgagttgctcttgcccggcgtcaatacgggataataccgcgccacatagcagaactttaaaagtgctcatcattggaaaacgttcttcggggcgaaaactctcaaggatcttaccgctgttgagatccagttcgatgtaacccactcgtgcacccaactgatcttcagcatcttttactttcaccagcgtttctgggtgagcaaaaacaggaaggcaaaatgccgcaaaaaagggaataagggcgacacggaaatgttgaatactcatactcttcctttttcaatattattgaagcatttatcagggttattgtctcatgagcggatacatatttgaatgtatttagaaaaataaacaaataggggttccgcgcacatttccccgaaaagtgccacctgacgtctaagaaaccattattatcatgacattaacctataaaaataggcgtatcacgaggccctttcgtctcgcgcgtttcggtgatgacggtgaaaacctctgacacatgcagctcccggagacggtcacagcttgtctgtaagcggatgccgggagcagacaagcccgtcagggcgcgtcagcgggtgttggcgggtgtcggggctggcttaactatgcggcatcagagcagattgtactgagagtgcaccatatgcggtgtgaaataccgcacagatgcgtaaggagaaaataccgcatcaggcgccattcgccattcaggctgcgcaactgttgggaagggcgatcggtgcgggcctcttcgctattacgccagctggcgaaagggggatgtgctgcaaggcgattaagttgggtaacgccagggttttcccagtcacgacgttgtaaaacgacggccagtgcca

SEQ ID NO: 131 - DNA, 20 bp, artificial sequence
  primer
ctgagaagggcgtgaagatc

SEQ ID NO: 132 - DNA, 54 bp, artificial sequence
  primer
gtcaagtggatcctggttagtatggacctcgacagccatctccatctggattcg

SEQ ID NO: 133 - DNA, 1833 bp, artificial sequence
  selectable marker
atgcagaaaccggtgtgtctggtcgtcgcgatgacccccaagaggggcatcggcatcaacaacggcctcccgtggccccacttgaccacagatttcaaacactttcgtcgtgtgacaaaaacgacgcccgaagaagccagtcgcctgaacgggtggcttcccaggaaatttgcaaagacgggcgactctggacttccctctccatcagtcggcaagagattcaacgccgttgtcatgggacggaaaaactgggaaagcatgcctcgaaagtttagacccctcgtggacagattgaacatcgtcgtttcctcttccctcaaagaagaagacattgcggcggagaagcctcaagctgaaggccagcagcgcgtccgagtctgtgcttcactcccagcagctctcagccttctggaggaagagtacaaggattctgtcgaccagatttttgtcgtgggaggagcgggactgtacgaggcagcgctgtctctgggcgttgcctctcacctgtacatcacgcgtgtagcccgcgagtttccgtgcgacgttttcttccctgcgttccccggagatgacattctttcaaacaaatcaactgctgcgcaggctgcagctcctgccgagtctgtgttcgttcccttttgtccggagctcggaagagagaaggacaatgaagcgacgtatcgacccatcttcatttccaagaccttctcagacaacggggtaccctacgactccgtggttctcgagaagagaaggaagactgacgacgcagccactgcggaaccgagcaacgcaatgagctccttgacgtccacgagggagacaactcccgtgcacgggttgcaggctccttcttcggccgcagccattgccccggtgttggcgtggatggacgaagaagaccggaaaaaacgcgagcaaaaggaactgattcgggccgttccgcatgttcactttagaggccatgaagaattccagtaccttgatctcattgccgacattattaacaatggaaggacaatggatgaccgaacgggcgttggtgtcatctccaaattcggctgcactatgcgctactcgctggatcaggcctttccacttctcaccacaaagcgtgtgttctggaaaggggtcctcgaagagttgctgtggttcattcgcggcgacacgaacgcaaaccatctttctgagaagggcgtgaagatctgggacaagaatgtgacacgcgagttcctcgattcgcgcaatctcccccaccgagaggtcggagacatcggcccgggctacggcttccagtggagacacttcggcgcggcatacaaagacatgcacacagactacacagggcagggcgtcgaccagctgaagaatgtgatccagatgctgagaacgaatccaacagatcgtcgcatgctcatgactgcctggaatcctgcagcgctggacgaaatggcgctgccgccttgtcacttgttgtgccagttctacgtgaacgaccagaaggagctgtcgtgcatcatgtatcagcggtcgtgcgatgtcggcctcggcgtccccttcaacatcgcttcctattcgcttttgacgctcatggttgcacacgtctgcaacctaaaacctaaggagttcattcacttcatggggaacacgcatgtctacacgaaccatgtcgaggctttaaaagagcagctgcggagagaaccgagaccgttccccattgtgaacatcctcaacaaggaacgcatcaaggaaatcgacgatttcaccgccgaggattttgaggtcgtgggctacgtcccgcacggacgaatccagatggagatggctgtctag

SEQ ID NO: 134 - DNA, 1161 bp, artificial sequence
  sequence TY
gaggtccatactaaccaggatccacttgacatggcttcgtacccctgccatcaacacgcgtctgcgttcgaccaggctgcgcgttctcgcggccataacaaccgacgtacggcgttgcgccctcgccggcaacaaaaagccacggaagtccgcctggagcagaaaatgcccacgctactgcgggtttatatagacggtccccacgggatggggaaaaccaccaccacgcaactgctggtggccctgggttcgcgcgacgatatcgtctacgtacccgagccgatgacttactggcgggtgttgggggcttccgagacaatcgcgaacatctacaccacacaacaccgcctcgaccagggtgagatatcggccggggacgcggcggtggtaatgacaagcgcccagataacaatgggcatgccttatgccgtgaccgacgccgttctggctcctcatatcgggggggaggctgggagctcacatgccccgcccccggccctcaccctcatcttcgaccgccatcccatcgccgccctcctgtgctacccggccgcgcgataccttatgggcagcatgaccccccaggccgtgctggcgttcgtggccctcatcccgccgaccttgcccggcacaaacatcgtgttgggggcccttccggaggacagacacatcgaccgcctggccaaacgccagcgccccggcgagcggcttgacctggctatgctggccgcgattcgccgcgtttatgggctgcttgccaatacggtgcggtatctgcagggcggcgggtcgtggcgggaggattggggacagctttcgggggcggccgtgccgccccagggtgccgagccccagagcaacgcgggcccacgaccccatatcggggacacgttatttaccctgtttcgggcccccgagttgctggcccccaacggcgacctgtataacgtgtttgcctgggctttggacgtcttggccaaacgcctccgtcccatgcatgtctttatcctggattacgaccaatcgcccgccggctgccgggacgccctgctgcaacttacctccgggatggtccagacccacgtcaccaccccaggctccataccgacgatctgcgacctggcgcgcacgtttgcccgggagatgggggaggctaactaa

SEQ ID NO: 135 - DNA, 1131 bp, Human herpes virus
atggcttcgtacccctgccatcaacacgcgtctgcgttcgaccaggctgcgcgttctcgcggccataacaaccgacgtacggcgttgcgccctcgccggcaacaaaaagccacggaagtccgcctggagcagaaaatgcccacgctactgcgggtttatatagacggtccccacgggatggggaaaaccaccaccacgcaactgctggtggccctgggttcgcgcgacgatatcgtctacgtacccgagccgatgacttactggcgggtgttgggggcttccgagacaatcgcgaacatctacaccacacaacaccgcctcgaccagggtgagatatcggccggggacgcggcggtggtaatgacaagcgcccagataacaatgggcatgccttatgccgtgaccgacgccgttctggctcctcatatcgggggggaggctgggagctcacatgccccgcccccggccctcaccctcatcttcgaccgccatcccatcgccgccctcctgtgctacccggccgcgcgataccttatgggcagcatgaccccccaggccgtgctggcgttcgtggccctcatcccgccgaccttgcccggcacaaacatcgtgttgggggcccttccggaggacagacacatcgaccgcctggccaaacgccagcgccccggcgagcggcttgacctggctatgctggccgcgattcgccgcgtttatgggctgcttgccaatacggtgcggtatctgcagggcggcgggtcgtggcgggaggattggggacagctttcgggggcggccgtgccgccccagggtgccgagccccagagcaacgcgggcccacgaccccatatcggggacacgttatttaccctgtttcgggcccccgagttgctggcccccaacggcgacctgtataacgtgtttgcctgggctttggacgtcttggccaaacgcctccgtcccatgcatgtctttatcctggattacgaccaatcgcccgccggctgccgggacgccctgctgcaacttacctccgggatggtccagacccacgtcaccaccccaggctccataccgacgatctgcgacctggcgcgcacgtttgcccgggagatgggggaggctaactga

SEQ ID NO: 136 - DNA, 53 bp, artificial sequence
  primer
gaggtccatactaaccaggatccacttgacatggcttcgtacccctgccatca

SEQ ID NO: 137 - DNA, 23 bp, artificial sequence
  primer
ttagttagcctcccccatctccc

SEQ ID NO: 138 - DNA, 363 bp, artificial sequence
  fusion gene
gggagatgggggaggctaactaacggaaatacagaagctgcccgtctctcgttttcctctcttttcggagggatcagggagagtgcctcgggtcggagagagctgacgagggggtgccagagacccctgtgtcctttatcgaagaaaagggatgactcttcatgtggcatttcacacagtctcacctcgccttgttttctttttgtcaatcagaacgaaagcgagttgcgggtgacgcagatgtgcgtgtatccactcgtgaatgcgttatcgttctgtatgccgctagagtgctggactgttgctgtctgcccacgacagcagacaactttccttctatgcacttgcaggattctagaaaaa

SEQ ID NO: 139 - DNA, 49 bp, artificial sequence
  primer
gggagatgggggaggctaactaacggaaatacagaagctgcccgtctct

SEQ ID NO: 140 - DNA, 33 bp, artificial sequence
  primer
tttttctagaatcctgcaagtgcatagaaggaa

SEQ ID NO: 141 - DNA, 363 bp, artificial sequence; identical to SEQ ID NO: 138
  fusion gene

SEQ ID NO: 142 - DNA, 7378 bp, artificial sequence
  plasmid
ctagaggatccccgggtaccgagctcgaattcgtaatcatggtcatagctgtttcctgtgtgaaattgttatccgctcacaattccacacaacatacgagccggaagcataaagtgtaaagcctggggtgcctaatgagtgagctaactcacattaattgcgttgcgctcactgcccgctttccagtcgggaaacctgtcgtgccagctgcattaatgaatcggccaacgcgcggggagaggcggtttgcgtattgggcgctcttccgcttcctcgctcactgactcgctgcgctcggtcgttcggctgcggcgagcggtatcagctcactcaaaggcggtaatacggttatccacagaatcaggggataacgcaggaaagaacatgtgagcaaaaggccagcaaaaggccaggaaccgtaaaaaggccgcgttgctggcgtttttccataggctccgcccccctgacgagcatcacaaaaatcgacgctcaagtcagaggtggcgaaacccgacaggactataaagataccaggcgtttccccctggaagctccctcgtgcgctctcctgttccgaccctgccgcttaccggatacctgtccgcctttctcccttcgggaagcgtggcgctttctcaaagctcacgctgtaggtatctcagttcggtgtaggtcgttcgctccaagctgggctgtgtgcacgaaccccccgttcagcccgaccgctgcgccttatccggtaactatcgtcttgagtccaacccggtaagacacgacttatcgccactggcagcagccactggtaacaggattagcagagcgaggtatgtaggcggtgctacagagttcttgaagtggtggcctaactacggctacactagaagaacagtatttggtatctgcgctctgctgaagccagttaccttcggaaaaagagttggtagctcttgatccggcaaacaaaccaccgctggtagcggtggtttttttgtttgcaagcagcagattacgcgcagaaaaaaaggatctcaagaagatcctttgatcttttctacggggtctgacgctcagtggaacgaaaactcacgttaagggattttggtcatgagattatcaaaaaggatcttcacctagatccttttaaattaaaaatgaagttttaaatcaatctaaagtatatatgagtaaacttggtctgacagttaccaatgcttaatcagtgaggcacctatctcagcgatctgtctatttcgttcatccatagttgcctgactccccgtcgtgtagataactacgatacgggagggcttaccatctggccccagtgctgcaatgataccgcgagacccacgctcaccggctccagatttatcagcaataaaccagccagccggaagggccgagcgcagaagtggtcctgcaactttatccgcctccatccagtctattaattgttgccgggaagctagagtaagtagttcgccagttaatagtttgcgcaacgttgttgccattgctacaggcatcgtggtgtcacgctcgtcgtttggtatggcttcattcagctccggttcccaacgatcaaggcgagttacatgatcccccatgttgtgcaaaaaagcggttagctccttcggtcctccgatcgttgtcagaagtaagttggccgcagtgttatcactcatggttatggcagcactgcataattctcttactgtcatgccatccgtaagatgcttttctgtgactggtgagtactcaaccaagtcattctgagaatagtgtatgcggcgaccgagttgctcttgcccggcgtcaatacgggataataccgcgccacatagcagaactttaaaagtgctcatcattggaaaacgttcttcggggcgaaaactctcaaggatcttaccgctgttgagatccagttcgatgtaacccactcgtgcacccaactgatcttcagcatcttttactttcaccagcgtttctgggtgagcaaaaacaggaaggcaaaatgccgcaaaaaagggaataagggcgacacggaaatgttgaatactcatactcttcctttttcaatattattgaagcatttatcagggttattgtctcatgagcggatacatatttgaatgtatttagaaaaataaacaaataggggttccgcgcacatttccccgaaaagtgccacctgacgtctaagaaaccattattatcatgacattaacctataaaaataggcgtatcacgaggccctttcgtctcgcgcgtttcggtgatgacggtgaaaacctctgacacatgcagctcccggagacggtcacagcttgtctgtaagcggatgccgggagcagacaagcccgtcagggcgcgtcagcgggtgttggcgggtgtcggggctggcttaactatgcggcatcagagcagattgtactgagagtgcaccatatgcggtgtgaaataccgcacagatgcgtaaggagaaaataccgcatcaggcgccattcgccattcaggctgcgcaactgttgggaagggcgatcggtgcgggcctcttcgctattacgccagctggcgaaagggggatgtgctgcaaggcgattaagttgggtaacgccagggttttcccagtcacgacgttgtaaaacgacggccagtgccaagcttcgccaggctgtaaatcccgtgagtcgtcctcacaaatcatcaagcaggtgtcctcagggagactgcctgactgagttatgctaattcctttctactttggcgtggtcacgtgtaaccatatccgaatcatttctctagccctacgaacaggtaagagcgctagggatgtccgtggagtagtgtgcttactcgataatattcagttgggactaccagcgaggcgctcgctttgctcacgcaatgcctgagacagttgcagaatgaatggtaaccgacaaacgcgttcatatgcgttttcaaacttagtagacgcgtactgtctgaaactggcggtcacaggcaccagataacgcccttggcatcggcatgtctcgtacagaggtccgtatgtagtgccacgacttctaaatccggcgacaggctggtcttttgtcttaccacgtattagcccgcgtgcgatttctcggagcgcacctgttcaacactagaaaacggagtttcctgatcgagaagccaccacctttccagaagttgaacgctagcatgtcattcgattttcaccccccgcgtagttcctgtgtgtcattcgttgtcgagacaactctgtcccgccccggtgctgttccatatgcgtgactttcccgcaattttttcagactttcaggaaagacaggctccggaacgatctcgtccatgactggtaaatccacgacaccgcaatggcccccagcacctctatctctcgtgccaggggactaacgttgtatgcgtctgcgtcttgtctttttgcattcgctttccaaaaaagagagccatccgttcccccgcacattcaacgccgcgagtgcggtttttgtcttttttgagtggtaggacgcttttcatgcgcgaactacgtggacattaagttccattctctttttcgacagcacgaaaccttgcattcaaacccgcccgcggaagatccgatcttgctgctgttcgcagtcccagtagcgtcctgtcggccgcgccgtctctgttggtgggcagccgctacacctgttatctgactgccgtgcgcgaaaatgacgccatttttgggaaaatcggggaacttcattctttaaaagtatgcggaggtttcctttttcttctgttcgtttctttttctcgggtttgataaccgtgttcgatgtaagcactttccgtctctcctccgtgctttgttcgacatcgagaccaggtgtgcagatccttcgcttgtcgatccggagacgcgtgtctcgtagaaccttttcattttaccacacggcagtgcggagcactgctctgagtgcagcagggacgggtgaagtttcgctttagtagtgcgtttctgctctacggggcgttgtcgtgtctgggaagatgcagaaaccggtgtgtctggtcgtcgcgatgacccccaagaggggcatcggcatcaacaacggcctcccgtggccccacttgaccacagatttcaaacactttcgtcgtgtgacaaaaacgacgcccgaagaagccagtcgcctgaacgggtggcttcccaggaaatttgcaaagacgggcgactctggacttccctctccatcagtcggcaagagattcaacgccgttgtcatgggacggaaaaactgggaaagcatgcctcgaaagtttagacccctcgtggacagattgaacatcgtcgtttcctcttccctcaaagaagaagacattgcggcggagaagcctcaagctgaaggccagcagcgcgtccgagtctgtgcttcactcccagcagctctcagccttctggaggaagagtacaaggattctgtcgaccagatttttgtcgtgggaggagcgggactgtacgaggcagcgctgtctctgggcgttgcctctcacctgtacatcacgcgtgtagcccgcgagtttccgtgcgacgttttcttccctgcgttccccggagatgacattctttcaaacaaatcaactgctgcgcaggctgcagctcctgccgagtctgtgttcgttcccttttgtccggagctcggaagagagaaggacaatgaagcgacgtatcgacccatcttcatttccaagaccttctcagacaacggggtaccctacgactccgtggttctcgagaagagaaggaagactgacgacgcagccactgcggaaccgagcaacgcaatgagctccttgacgtccacgagggagacaactcccgtgcacgggttgcaggctccttcttcggccgcagccattgccccggtgttggcgtggatggacgaagaagaccggaaaaaacgcgagcaaaaggaactgattcgggccgttccgcatgttcactttagaggccatgaagaattccagtaccttgatctcattgccgacattattaacaatggaaggacaatggatgaccgaacgggcgttggtgtcatctccaaattcggctgcactatgcgctactcgctggatcaggcctttccacttctcaccacaaagcgtgtgttctggaaaggggtcctcgaagagttgctgtggttcattcgcggcgacacgaacgcaaaccatctttctgagaagggcgtgaagatctgggacaagaatgtgacacgcgagttcctcgattcgcgcaatctcccccaccgagaggtcggagacatcggcccgggctacggcttccagtggagacacttcggcgcggcatacaaagacatgcacacagactacacagggcagggcgtcgaccagctgaagaatgtgatccagatgctgagaacgaatccaacagatcgtcgcatgctcatgactgcctggaatcctgcagcgctggacgaaatggcgctgccgccttgtcacttgttgtgccagttctacgtgaacgaccagaaggagctgtcgtgcatcatgtatcagcggtcgtgcgatgtcggcctcggcgtccccttcaacatcgcttcctattcgcttttgacgctcatggttgcacacgtctgcaacctaaaacctaaggagttcattcacttcatggggaacacgcatgtctacacgaaccatgtcgaggctttaaaagagcagctgcggagagaaccgagaccgttccccattgtgaacatcctcaacaaggaacgcatcaaggaaatcgacgatttcaccgccgaggattttgaggtcgtgggctacgtcccgcacggacgaatccagatggagatggctgtcgaggtccatactaaccaggatccacttgacatggcttcgtacccctgccatcaacacgcgtctgcgttcgaccaggctgcgcgttctcgcggccataacaaccgacgtacggcgttgcgccctcgccggcaacaaaaagccacggaagtccgcctggagcagaaaatgcccacgctactgcgggtttatatagacggtccccacgggatggggaaaaccaccaccacgcaactgctggtggccctgggttcgcgcgacgatatcgtctacgtacccgagccgatgacttactggcgggtgttgggggcttccgagacaatcgcgaacatctacaccacacaacaccgcctcgaccagggtgagatatcggccggggacgcggcggtggtaatgacaagcgcccagataacaatgggcatgccttatgccgtgaccgacgccgttctggctcctcatatcgggggggaggctgggagctcacatgccccgcccccggccctcaccctcatcttcgaccgccatcccatcgccgccctcctgtgctacccggccgcgcgataccttatgggcagcatgaccccccaggccgtgctggcgttcgtggccctcatcccgccgaccttgcccggcacaaacatcgtgttgggggcccttccggaggacagacacatcgaccgcctggccaaacgccagcgccccggcgagcggcttgacctggctatgctggccgcgattcgccgcgtttatgggctgcttgccaatacggtgcggtatctgcagggcggcgggtcgtggcgggaggattggggacagctttcgggggcggccgtgccgccccagggtgccgagccccagagcaacgcgggcccacgaccccatatcggggacacgttatttaccctgtttcgggcccccgagttgctggcccccaacggcgacctgtataacgtgtttgcctgggctttggacgtcttggccaaacgcctccgtcccatgcatgtctttatcctggattacgaccaatcgcccgccggctgccgggacgccctgctgcaacttacctccgggatggtccagacccacgtcaccaccccaggctccataccgacgatctgcgacctggcgcgcacgtttgcccgggagatgggggaggctaactaacggaaatacagaagctgcccgtctctcgttttcctctcttttcggagggatcagggagagtgcctcgggtcggagagagctgacgagggggtgccagagacccctgtgtcctttatcgaagaaaagggatgactcttcatgtggcatttcacacagtctcacctcgccttgttttctttttgtcaatcagaacgaaagcgagttgcgggtgacgcagatgtgcgtgtatccactcgtgaatgcgttatcgttctgtatgccgctagagtgctggactgttgctgtctgcccacgacagcagacaactttccttctatgcacttgcaggatt

SEQ ID NO: 143 - DNA, 56 bp, artificial sequence
  primer
aaaggtacctctagaagtatactattcgaaaaactagtatcgataagcttgaacac

SEQ ID NO: 144 - DNA, 26 bp, artificial sequence
  primer
aacttaagaattttgtttaaacaggg

SEQ ID NO: 145 - DNA, 6616 bp, artificial sequence
  plasmid
ctgacgcgccctgtagcggcgcattaagcgcggcgggtgtggtggttacgcgcagcgtgaccgctacacttgccagcgccctagcgcccgctcctttcgctttcttcccttcctttctcgccacgttcgccggctttccccgtcaagctctaaatcgggggctccctttagggttccgatttagtgctttacggcacctcgaccccaaaaaacttgattagggtgatggttcacgtagtgggccatcgccctgatagacggtttttcgccctttgacgttggagtccacgttctttaatagtggactcttgttccaaactggaacaacactcaaccctatctcggtctattcttttgatttataagggattttgccgatttcggcctattggttaaaaaatgagctgatttaacaaaaatttaacgcgaattttaacaaaatattaacgcttacaatttccattcgccattcaggctgcgcaactgttgggaagggcgatcggtgcgggcctcttcgctattacgccagctggcgaaagggggatgtgctgcaaggcgattaagttgggtaacgccagggttttcccagtcacgacgttgtaaaacgacggccagtgagcgcgcgtaatacgactcactatagggcgaattgggtaccgggccccccctcgacggtatcgataagcttaaccacaaaccttgagacgcgtgttccaaccacgcaccctgacacgcgtgttccaaccacgcaccctgagacgcgtgttctaaccacgcaccctgagacgcgtgttctaaccacgcaccctgagacgcgtgttcaagcttgcctgcattgggtgcggttggtgatcctggttggaccggtggagatgcgcgcgcacgaaggggatgtgtcagaaacattttgtttgttctctgtgaacttttagatgtgttaaaggcggcgaatattagcagagagtcctccttgttccattctctcttgaatttcgccctttccttctctttgcgagtgtggtagagaacaagcactcgttcgccgtccctgacgacgcaacccgcgcagaagacatccaccaaacggtgttacacaatcaccttgtgtgaagttcttgcggaaaactactcgttggcattttttcttgaattccctttttcgacaaaatgcaggagcagaagctcatctccgaggaggacctggccatggccatgcatagtaaaggagaagaacttttcactggagttgtcccaattcttgttgaattagatggtgatgttaatgggcacaaattttctgtcagtggagagggtgaaggtgatgcaacatacggaaaacttacccttaaatttatttgcactactggaaaactacctgttccatggccaacacttgtcactactttctcttatggtgttcaatgcttttcaagatacccagatcatatgaagcggcacgacttcttcaagagcgccatgcctgagggatacgtgcaggagaggaccatcttcttcaaggacgacgggaactacaagacacgtgctgaagtcaagtttgagggagacaccctcgtcaacaggatcgagcttaagggaatcgatttcaaggaggacggaaacatcctcggccacaagttggaatacaactacaactcccacaacgtatacatcatggccgacaagcaaaagaacggcatcaaagccaacttcaagacccgccacaacatcgaagacggcggcgtgcaactcgctgatcattatcaacaaaatactccaattggcgatggccctgtccttttaccagacaaccattacctgtccacacaatctgccctttcgaaagatcccaacgaaaagagagaccacatggtccttcttgagtttgtaacagctgctgggattacacatggcatggatgaactatacaaagctgcaggaaaaagcatggtctttttgaaacaagaaggtgcaaaaatattgacaaaaatacaaagagagaaacttgttgaatgggaaaattgtgtgagtgtaattgaagctgctatacttaaacacaaatacaaacaaaaggttaacaaaaatataccttctcttttgagagtacaagctcatataagaaaaaaaatggtagctaatgcattggaggtccacacgaaccaggacccgctcgattaattaatcaccgttgtgctcacttctcaaatcgacaaaggaaacacacttcgtgcagcatgtgccccattataaagaaactgagttgttccgctgtggcttgcaggtgtcacatccacaaaaaccggccgactctaaataggagtgtttcgcagcaagcagcgaaagtttatgactgggtccgaatctctgaacggatgtgtggcggacctggctgatgttgatcgccgtcgacacacgcgccacatgggtcaatacacaagacagctatcagttgttttagtcgaaccggttaacacaattcttgcccccccgagggggatccactagttctagagcggccgccaccgcggtgtcactgtagcctgccagaacacttgtcaaccgactgtgtccacatttttatgcgcactgactggcatgaatggccagaggcaggcatcagcaagtcacgtaggccaacgcgtgcgcagaaacgctcaaggctcgattgtgggtgggggttggtagcattttatcgacctaaacaaggtttacacttaggtggtgcggttttactgatctggacggattcagcggtcgcagattatcgatctgcaaatggtgtacacttaggtgtcgcggcttatttagttaagggagcttcgtggtcggagcctaacaagtcaacagagacgtatcgccaatcgttcgcggtgaagagtcgaaactgacagcacatcgtagggaaactgagagggtgctcctttctctccgtcgtttgcgctgcaccatcctgcaagtgcatagaaggaaagttgtctgctgtcgtgggcagacagcaacagtccagcactctagcggcatacagaacgataacgcattcacgagtggatacacgcacatctgcgtcacccgcaactcgctttcgttctgattgacaaaaagaaaacaaggcgaggtgagactgtgtgaaatgccacatgaagagtcatcccttttcttcgataaaggacacaggggtctctggcaccccctcgtcagctctctccgacccgaggcactctccctgatccctccgaaaagagaggaaaacgagagacgggcagcttctgtagggctatgcagggtttacttctcgaactttttgcgagcggcgtcgctcaggacggcgacgtggtcgaagtcgcggaacatctcgttgaagtcgtagcagcaaccaacgatccagacgtcttcaatgctgaagccgacgaagtcgcccttcaagctgttggagcgatctgtgcgcttctcgacgagggtggcgattctcatcgacttgggaccgacggctttcaggcgctcaccgaactcggtgagggtgaaaccggtgtcgacgatgtcctcaacaatcagaacgtgcttgtcgcgaaagattgacaagtcgtcgctcaagacggtgagctggcctgtgctgttgtcgttctggtaggacttcaggcggacatagtgctcgaagaaggggggcacgctggactcacgaccactgtacttctgtatggtggcaaggtagtcgatcagaaggttgaagaagccgcgagagcctttcaggatgcaaatgatgtgcaactcctcgccgaagtaagttctgtggatgtcatacgccaacttctcaactctgtccttgaccaatccaccagggaggaggattttgtcaatgtagggcttgcagtgggggggcacaagaaagtcatcagcgttgtagaaggtgttgtcggggatatacatgggctcaatacggcccttgcccttgccgtagtcttcaatgggtttggacgccattttggatctgacaacgccccgtagagcagaaacgcactactaaagcgaaacttcacccgtccctgctgcactcagagcagtgctccgcactgccgtgtggtaaaatgaaaaggttctacgagacacgcgtctccggatcgacaagcgaaggatctgcacacctggtctcgatgtcgaacaaagcacggaggagagacggaaagtgcttacatcgaacacggttatcaaacccgagaaaaagaaacgaacagaagaaaaaggaaacctccgcatacttttaaagaatgaagttccccgattttcccaaaaatggcgtcattttcgcgcacggcagtcagataacaggtgtagcggctgcccaccaacagagacggcgcggccgacaggacgctactgggactgcgaacagcagcaagatcggatcttccgcggtggagctccagcttttgttccctttagtgagggttaattgcgcgcttggcgtaatcatggtcatagctgtttcctgtgtgaaattgttatccgctcacaattccacacaacatacgagccggaagcataaagtgtaaagcctggggtgcctaatgagtgagctaactcacattaattgcgttgcgctcactgcccgctttccagtcgggaaacctgtcgtgccagctgcattaatgaatcggccaacgcgcggggagaggcggtttgcgtattgggcgctcttccgcttcctcgctcactgactcgctgcgctcggtcgttcggctgcggcgagcggtatcagctcactcaaaggcggtaatacggttatccacagaatcaggggataacgcaggaaagaacatgtgagcaaaaggccagcaaaaggccaggaaccgtaaaaaggccgcgttgctggcgtttttccataggctccgcccccctgacgagcatcacaaaaatcgacgctcaagtcagaggtggcgaaacccgacaggactataaagataccaggcgtttccccctggaagctccctcgtgcgctctcctgttccgaccctgccgcttaccggatacctgtccgcctttctcccttcgggaagcgtggcgctttctcatagctcacgctgtaggtatctcagttcggtgtaggtcgttcgctccaagctgggctgtgtgcacgaaccccccgttcagcccgaccgctgcgccttatccggtaactatcgtcttgagtccaacccggtaagacacgacttatcgccactggcagcagccactggtaacaggattagcagagcgaggtatgtaggcggtgctacagagttcttgaagtggtggcctaactacggctacactagaaggacagtatttggtatctgcgctctgctgaagccagttaccttcggaaaaagagttggtagctcttgatccggcaaacaaaccaccgctggtagcggtggtttttttgtttgcaagcagcagattacgcgcagaaaaaaaggatctcaagaagatcctttgatcttttctacggggtctgacgctcagtggaacgaaaactcacgttaagggattttggtcatgagattatcaaaaaggatcttcacctagatccttttaaattaaaaatgaagttttaaatcaatctaaagtatatatgagtaaacttggtctgacagttaccaatgcttaatcagtgaggcacctatctcagcgatctgtctatttcgttcatccatagttgcctgactccccgtcgtgtagataactacgatacgggagggcttaccatctggccccagtgctgcaatgataccgcgagacccacgctcaccggctccagatttatcagcaataaaccagccagccggaagggccgagcgcagaagtggtcctgcaactttatccgcctccatccagtctattaattgttgccgggaagctagagtaagtagttcgccagttaatagtttgcgcaacgttgttgccattgctacaggcatcgtggtgtcacgctcgtcgtttggtatggcttcattcagctccggttcccaacgatcaaggcgagttacatgatcccccatgttgtgcaaaaaagcggttagctccttcggtcctccgatcgttgtcagaagtaagttggccgcagtgttatcactcatggttatggcagcactgcataattctcttactgtcatgccatccgtaagatgcttttctgtgactggtgagtactcaaccaagtcattctgagaatagtgtatgcggcgaccgagttgctcttgcccggcgtcaatacgggataataccgcgccacatagcagaactttaaaagtgctcatcattggaaaacgttcttcggggcgaaaactctcaaggatcttaccgctgttgagatccagttcgatgtaacccactcgtgcacccaactgatcttcagcatcttttactttcaccagcgtttctgggtgagcaaaaacaggaaggcaaaatgccgcaaaaaagggaataagggcgacacggaaatgttgaatactcatactcttcctttttcaatattattgaagcatttatcagggttattgtctcatgagcggatacatatttgaatgtatttagaaaaataaacaaataggggttccgcgcacatttccccgaaaagtgccac

SEQ ID NO: 146 - DNA, 26 bp, artificial sequence
  primer
tttaaacaaaattcttaagttgcggc

SEQ ID NO: 147 - DNA, 29 bp, artificial sequence
  primer
tttgagctctctagaatttaaatcctagg

SEQ ID NO: 148 - DNA, 3582 bp, artificial sequence
  plasmid
ctctagaagtatactattcgaaaaactagtatcgataagcttgaacacgcgtctcagggtgcgtggttagaacacgcgtctcagggtgcgtggttagaacacgcgtctcagggtgcgtggttggaacacgcgtgtcagggtgcgtggttggaacacgcgtctcaaggtttgtggttaagcttgcctgcattgggtgcggttggtgatcctggttggaccggtggagatgcgcgcgcacgaaggggatgtgtcagaaacattttgtttgttctctgtgaacttttagatgtgttaaaggcggcgaatattagcagagagtcctccttgttggattctctcttgaatttcgccctttccttctctttgcgagtctcgtagagaacaagcactcgttcgccgtccctgacgacgcaacccgcgcagaagacatccaccaaacggtgttacacaatcaccttgtgtgaagttcttgcggaaaactactcgttggcattttttcttgaattccctgtttaaacaaaattcttaagttgcggccgcttccatggttttaattaatcaccgttgtgctcacttctcaaatcgacaaaggaaacacacttcgtgcagcatgtgccccattataaagaaactgagttgttccgctgtggcttgcaggtgtcacatccacaaaaaccggccgactctaaataggagtgtttcgcagcaagcagcgaaagtttatgactgggtccgaatctctgaacggatgtgtggcggacctggctgatgttgatcgccgtcgacacacgcgccacatgggtcaatacacaagacagctatcagttgttttagtcgaaccggttaacacaattcttgcccccccgaggcgcgccaacctaggatttaaattctagagagctcgaattcgtaatcatggtcatagctgtttcctgtgtgaaattgttatccgctcacaattccacacaacatacgagccggaagcataaagtgtaaagcctggggtgcctaatgagtgagctaactcacattaattgcgttgcgctcactgcccgctttccagtcgggaaacctgtcgtgccagctgcattaatgaatcggccaacgcgcggggagaggcggtttgcgtattgggcgctcttccgcttcctcgctcactgactcgctgcgctcggtcgttcggctgcggcgagcggtatcagctcactcaaaggcggtaatacggttatccacagaatcaggggataacgcaggaaagaacatgtgagcaaaaggccagcaaaaggccaggaaccgtaaaaaggccgcgttgctggcgtttttccataggctccgcccccctgacgagcatcacaaaaatcgacgctcaagtcagaggtggcgaaacccgacaggactataaagataccaggcgtttccccctggaagctccctcgtgcgctctcctgttccgaccctgccgcttaccggatacctgtccgcctttctcccttcgggaagcgtggcgctttctcaaagctcacgctgtaggtatctcagttcggtgtaggtcgttcgctccaagctgggctgtgtgcacgaaccccccgttcagcccgaccgctgcgccttatccggtaactatcgtcttgagtccaacccggtaagacacgacttatcgccactggcagcagccactggtaacaggattagcagagcgaggtatgtaggcggtgctacagagttcttgaagtggtggcctaactacggctacactagaagaacagtatttggtatctgcgctctgctgaagccagttaccttcggaaaaagagttggtagctcttgatccggcaaacaaaccaccgctggtagcggtggtttttttgtttgcaagcagcagattacgcgcagaaaaaaaggatctcaagaagatcctttgatcttttctacggggtctgacgctcagtggaacgaaaactcacgttaagggattttggtcatgagattatcaaaaaggatcttcacctagatccttttaaattaaaaatgaagttttaaatcaatctaaagtatatatgagtaaacttggtctgacagttaccaatgcttaatcagtgaggcacctatctcagcgatctgtctatttcgttcatccatagttgcctgactccccgtcgtgtagataactacgatacgggagggcttaccatctggccccagtgctgcaatgataccgcgagacccacgctcaccggctccagatttatcagcaataaaccagccagccggaagggccgagcgcagaagtggtcctgcaactttatccgcctccatccagtctattaattgttgccgggaagctagagtaagtagttcgccagttaatagtttgcgcaacgttgttgccattgctacaggcatcgtggtgtcacgctcgtcgtttggtatggcttcattcagctccggttcccaacgatcaaggcgagttacatgatcccccatgttgtgcaaaaaagcggttagctccttcggtcctccgatcgttgtcagaagtaagttggccgcagtgttatcactcatggttatggcagcactgcataattctcttactgtcatgccatccgtaagatgcttttctgtgactggtgagtactcaaccaagtcattctgagaatagtgtatgcggcgaccgagttgctcttgcccggcgtcaatacgggataataccgcgccacatagcagaactttaaaagtgctcatcattggaaaacgttcttcggggcgaaaactctcaaggatcttaccgctgttgagatccagttcgatgtaacccactcgtgcacccaactgatcttcagcatcttttactttcaccagcgtttctgggtgagcaaaaacaggaaggcaaaatgccgcaaaaaagggaataagggcgacacggaaatgttgaatactcatactcttcctttttcaatattattgaagcatttatcagggttattgtctcatgagcggatacatatttgaatgtatttagaaaaataaacaaataggggttccgcgcacatttccccgaaaagtgccacctgacgtctaagaaaccattattatcatgacattaacctataaaaataggcgtatcacgaggccctttcgtctcgcgcgtttcggtgatgacggtgaaaacctctgacacatgcagctcccggagacggtcacagcttgtctgtaagcggatgccgggagcagacaagcccgtcagggcgcgtcagcgggtgttggcgggtgtcggggctggcttaactatgcggcatcagagcagattgtactgagagtgcaccatatgcggtgtgaaataccgcacagatgcgtaaggagaaaataccgcatcaggcgccattcgccattcaggctgcgcaactgttgggaagggcgatcggtgcgggcctcttcgctattacgccagctggcgaaagggggatgtgctgcaaggcgattaagttgggtaacgccagggttttcccagtcacgacgttgtaaaacgacggccagtgccaagcttgcatgcctgcaggtcgactctagaggatccccgggtac

SEQ ID NO: 149 - DNA, 896 bp, artificial sequence
  selectable marker
tctagaagtatactattcgaaaaactagtatcgataagcttgaacacgcgtctcagggtgcgtggttagaacacgcgtctcagggtgcgtggttagaacacgcgtctcagggtgcgtggttggaacacgcgtgtcagggtgcgtggttggaacacgcgtctcaaggtttgtggttaagcttgcctgcattgggtgcggttggtgatcctggttggaccggtggagatgcgcgcgcacgaaggggatgtgtcagaaacattttgtttgttctctgtgaacttttagatgtgttaaaggcggcgaatattagcagagagtcctccttgttggattctctcttgaatttcgccctttccttctctttgcgagtctcgtagagaacaagcactcgttcgccgtccctgacgacgcaacccgcgcagaagacatccaccaaacggtgttacacaatcaccttgtgtgaagttcttgcggaaaactactcgttggcattttttcttgaattccctgtttaaacaaaattcttaagttgcggccgcttccatggttttaattaatcaccgttgtgctcacttctcaaatcgacaaaggaaacacacttcgtgcagcatgtgccccattataaagaaactgagttgttccgctgtggcttgcaggtgtcacatccacaaaaaccggccgactctaaataggagtgtttcgcagcaagcagcgaaagtttatgactgggtccgaatctctgaacggatgtgtggcggacctggctgatgttgatcgccgtcgacacacgcgccacatgggtcaatacacaagacagctatcagttgttttagtcgaaccggttaacacaattcttgcccccccgaggcgcgccaacctaggatttaaattctaga

SEQ ID NO: 150 - DNA, 8268 bp, artificial sequence
  plasmid
ctagaatttaaatcctaggttggcgcgcctcgggggggcaagaattgtgttaaccggttcgactaaaacaactgatagctgtcttgtgtattgacccatgtggcgcgtgtgtcgacggcgatcaacatcagccaggtccgccacacatccgttcagagattcggacccagtcataaactttcgctgcttgctgcgaaacactcctatttagagtcggccggtttttgtggatgtgacacctgcaagccacagcggaacaactcagtttctttataatggggcacatgctgcacgaagtgtgtttcctttgtcgatttgagaagtgagcacaacggtgattaattaaaaccatggaagcggccgcaacttaagaattttgtttaaacagggaattcaagaaaaaatgccaacgagtagttttccgcaagaacttcacacaaggtgattgtgtaacaccgtttggtggatgtcttctgcgcgggttgcgtcgtcagggacggcgaacgagtgcttgttctctacgagactcgcaaagagaaggaaagggcgaaattcaagagagaatccaacaaggaggactctctgctaatattcgccgcctttaacacatctaaaagttcacagagaacaaacaaaatgtttctgacacatccccttcgtgcgcgcgcatctccaccggtccaaccaggatcaccaaccgcacccaatgcaggcaagcttaaccacaaaccttgagacgcgtgttccaaccacgcaccctgacacgcgtgttccaaccacgcaccctgagacgcgtgttctaaccacgcaccctgagacgcgtgttctaaccacgcaccctgagacgcgtgttcaagcttatcgatactagtttttcgaatagtatacttctagaggatccccgggtaccgagctcgaattcgtaatcatggtcatagctgtttcctgtgtgaaattgttatccgctcacaattccacacaacatacgagccggaagcataaagtgtaaagcctggggtgcctaatgagtgagctaactcacattaattgcgttgcgctcactgcccgctttccagtcgggaaacctgtcgtgccagctgcattaatgaatcggccaacgcgcggggagaggcggtttgcgtattgggcgctcttccgcttcctcgctcactgactcgctgcgctcggtcgttcggctgcggcgagcggtatcagctcactcaaaggcggtaatacggttatccacagaatcaggggataacgcaggaaagaacatgtgagcaaaaggccagcaaaaggccaggaaccgtaaaaaggccgcgttgctggcgtttttccataggctccgcccccctgacgagcatcacaaaaatcgacgctcaagtcagaggtggcgaaacccgacaggactataaagataccaggcgtttccccctggaagctccctcgtgcgctctcctgttccgaccctgccgcttaccggatacctgtccgcctttctcccttcgggaagcgtggcgctttctcaaagctcacgctgtaggtatctcagttcggtgtaggtcgttcgctccaagctgggctgtgtgcacgaaccccccgttcagcccgaccgctgcgccttatccggtaactatcgtcttgagtccaacccggtaagacacgacttatcgccactggcagcagccactggtaacaggattagcagagcgaggtatgtaggcggtgctacagagttcttgaagtggtggcctaactacggctacactagaagaacagtatttggtatctgcgctctgctgaagccagttaccttcggaaaaagagttggtagctcttgatccggcaaacaaaccaccgctggtagcggtggtttttttgtttgcaagcagcagattacgcgcagaaaaaaaggatctcaagaagatcctttgatcttttctacggggtctgacgctcagtggaacgaaaactcacgttaagggattttggtcatgagattatcaaaaaggatcttcacctagatccttttaaattaaaaatgaagttttaaatcaatctaaagtatatatgagtaaacttggtctgacagttaccaatgcttaatcagtgaggcacctatctcagcgatctgtctatttcgttcatccatagttgcctgactccccgtcgtgtagataactacgatacgggagggcttaccatctggccccagtgctgcaatgataccgcgagacccacgctcaccggctccagatttatcagcaataaaccagccagccggaagggccgagcgcagaagtggtcctgcaactttatccgcctccatccagtctattaattgttgccgggaagctagagtaagtagttcgccagttaatagtttgcgcaacgttgttgccattgctacaggcatcgtggtgtcacgctcgtcgtttggtatggcttcattcagctccggttcccaacgatcaaggcgagttacatgatcccccatgttgtgcaaaaaagcggttagctccttcggtcctccgatcgttgtcagaagtaagttggccgcagtgttatcactcatggttatggcagcactgcataattctcttactgtcatgccatccgtaagatgcttttctgtgactggtgagtactcaaccaagtcattctgagaatagtgtatgcggcgaccgagttgctcttgcccggcgtcaatacgggataataccgcgccacatagcagaactttaaaagtgctcatcattggaaaacgttcttcggggcgaaaactctcaaggatcttaccgctgttgagatccagttcgatgtaacccactcgtgcacccaactgatcttcagcatcttttactttcaccagcgtttctgggtgagcaaaaacaggaaggcaaaatgccgcaaaaaagggaataagggcgacacggaaatgttgaatactcatactcttcctttttcaatattattgaagcatttatcagggttattgtctcatgagcggatacatatttgaatgtatttagaaaaataaacaaataggggttccgcgcacatttccccgaaaagtgccacctgacgtctaagaaaccattattatcatgacattaacctataaaaataggcgtatcacgaggccctttcgtctcgcgcgtttcggtgatgacggtgaaaacctctgacacatgcagctcccggagacggtcacagcttgtctgtaagcggatgccgggagcagacaagcccgtcagggcgcgtcagcgggtgttggcgggtgtcggggctggcttaactatgcggcatcagagcagattgtactgagagtgcaccatatgcggtgtgaaataccgcacagatgcgtaaggagaaaataccgcatcaggcgccattcgccattcaggctgcgcaactgttgggaagggcgatcggtgcgggcctcttcgctattacgccagctggcgaaagggggatgtgctgcaaggcgattaagttgggtaacgccagggttttcccagtcacgacgttgtaaaacgacggccagtgccaagcttcgccaggctgtaaatcccgtgagtcgtcctcacaaatcatcaagcaggtgtcctcagggagactgcctgactgagttatgctaattcctttctactttggcgtggtcacgtgtaaccatatccgaatcatttctctagccctacgaacaggtaagagcgctagggatgtccgtggagtagtgtgcttactcgataatattcagttgggactaccagcgaggcgctcgctttgctcacgcaatgcctgagacagttgcagaatgaatggtaaccgacaaacgcgttcatatgcgttttcaaacttagtagacgcgtactgtctgaaactggcggtcacaggcaccagataacgcccttggcatcggcatgtctcgtacagaggtccgtatgtagtgccacgacttctaaatccggcgacaggctggtcttttgtcttaccacgtattagcccgcgtgcgatttctcggagcgcacctgttcaacactagaaaacggagtttcctgatcgagaagccaccacctttccagaagttgaacgctagcatgtcattcgattttcaccccccgcgtagttcctgtgtgtcattcgttgtcgagacaactctgtcccgccccggtgctgttccatatgcgtgactttcccgcaattttttcagactttcaggaaagacaggctccggaacgatctcgtccatgactggtaaatccacgacaccgcaatggcccccagcacctctatctctcgtgccaggggactaacgttgtatgcgtctgcgtcttgtctttttgcattcgctttccaaaaaagagagccatccgttcccccgcacattcaacgccgcgagtgcggtttttgtcttttttgagtggtaggacgcttttcatgcgcgaactacgtggacattaagttccattctctttttcgacagcacgaaaccttgcattcaaacccgcccgcggaagatccgatcttgctgctgttcgcagtcccagtagcgtcctgtcggccgcgccgtctctgttggtgggcagccgctacacctgttatctgactgccgtgcgcgaaaatgacgccatttttgggaaaatcggggaacttcattctttaaaagtatgcggaggtttcctttttcttctgttcgtttctttttctcgggtttgataaccgtgttcgatgtaagcactttccgtctctcctccgtgctttgttcgacatcgagaccaggtgtgcagatccttcgcttgtcgatccggagacgcgtgtctcgtagaaccttttcattttaccacacggcagtgcggagcactgctctgagtgcagcagggacgggtgaagtttcgctttagtagtgcgtttctgctctacggggcgttgtcgtgtctgggaagatgcagaaaccggtgtgtctggtcgtcgcgatgacccccaagaggggcatcggcatcaacaacggcctcccgtggccccacttgaccacagatttcaaacactttcgtcgtgtgacaaaaacgacgcccgaagaagccagtcgcctgaacgggtggcttcccaggaaatttgcaaagacgggcgactctggacttccctctccatcagtcggcaagagattcaacgccgttgtcatgggacggaaaaactgggaaagcatgcctcgaaagtttagacccctcgtggacagattgaacatcgtcgtttcctcttccctcaaagaagaagacattgcggcggagaagcctcaagctgaaggccagcagcgcgtccgagtctgtgcttcactcccagcagctctcagccttctggaggaagagtacaaggattctgtcgaccagatttttgtcgtgggaggagcgggactgtacgaggcagcgctgtctctgggcgttgcctctcacctgtacatcacgcgtgtagcccgcgagtttccgtgcgacgttttcttccctgcgttccccggagatgacattctttcaaacaaatcaactgctgcgcaggctgcagctcctgccgagtctgtgttcgttcccttttgtccggagctcggaagagagaaggacaatgaagcgacgtatcgacccatcttcatttccaagaccttctcagacaacggggtaccctacgactccgtggttctcgagaagagaaggaagactgacgacgcagccactgcggaaccgagcaacgcaatgagctccttgacgtccacgagggagacaactcccgtgcacgggttgcaggctccttcttcggccgcagccattgccccggtgttggcgtggatggacgaagaagaccggaaaaaacgcgagcaaaaggaactgattcgggccgttccgcatgttcactttagaggccatgaagaattccagtaccttgatctcattgccgacattattaacaatggaaggacaatggatgaccgaacgggcgttggtgtcatctccaaattcggctgcactatgcgctactcgctggatcaggcctttccacttctcaccacaaagcgtgtgttctggaaaggggtcctcgaagagttgctgtggttcattcgcggcgacacgaacgcaaaccatctttctgagaagggcgtgaagatctgggacaagaatgtgacacgcgagttcctcgattcgcgcaatctcccccaccgagaggtcggagacatcggcccgggctacggcttccagtggagacacttcggcgcggcatacaaagacatgcacacagactacacagggcagggcgtcgaccagctgaagaatgtgatccagatgctgagaacgaatccaacagatcgtcgcatgctcatgactgcctggaatcctgcagcgctggacgaaatggcgctgccgccttgtcacttgttgtgccagttctacgtgaacgaccagaaggagctgtcgtgcatcatgtatcagcggtcgtgcgatgtcggcctcggcgtccccttcaacatcgcttcctattcgcttttgacgctcatggttgcacacgtctgcaacctaaaacctaaggagttcattcacttcatggggaacacgcatgtctacacgaaccatgtcgaggctttaaaagagcagctgcggagagaaccgagaccgttccccattgtgaacatcctcaacaaggaacgcatcaaggaaatcgacgatttcaccgccgaggattttgaggtcgtgggctacgtcccgcacggacgaatccagatggagatggctgtcgaggtccatactaaccaggatccacttgacatggcttcgtacccctgccatcaacacgcgtctgcgttcgaccaggctgcgcgttctcgcggccataacaaccgacgtacggcgttgcgccctcgccggcaacaaaaagccacggaagtccgcctggagcagaaaatgcccacgctactgcgggtttatatagacggtccccacgggatggggaaaaccaccaccacgcaactgctggtggccctgggttcgcgcgacgatatcgtctacgtacccgagccgatgacttactggcgggtgttgggggcttccgagacaatcgcgaacatctacaccacacaacaccgcctcgaccagggtgagatatcggccggggacgcggcggtggtaatgacaagcgcccagataacaatgggcatgccttatgccgtgaccgacgccgttctggctcctcatatcgggggggaggctgggagctcacatgccccgcccccggccctcaccctcatcttcgaccgccatcccatcgccgccctcctgtgctacccggccgcgcgataccttatgggcagcatgaccccccaggccgtgctggcgttcgtggccctcatcccgccgaccttgcccggcacaaacatcgtgttgggggcccttccggaggacagacacatcgaccgcctggccaaacgccagcgccccggcgagcggcttgacctggctatgctggccgcgattcgccgcgtttatgggctgcttgccaatacggtgcggtatctgcagggcggcgggtcgtggcgggaggattggggacagctttcgggggcggccgtgccgccccagggtgccgagccccagagcaacgcgggcccacgaccccatatcggggacacgttatttaccctgtttcgggcccccgagttgctggcccccaacggcgacctgtataacgtgtttgcctgggctttggacgtcttggccaaacgcctccgtcccatgcatgtctttatcctggattacgaccaatcgcccgccggctgccgggacgccctgctgcaacttacctccgggatggtccagacccacgtcaccaccccaggctccataccgacgatctgcgacctggcgcgcacgtttgcccgggagatgggggaggctaactaacggaaatacagaagctgcccgtctctcgttttcctctcttttcggagggatcagggagagtgcctcgggtcggagagagctgacgagggggtgccagagacccctgtgtcctttatcgaagaaaagggatgactcttcatgtggcatttcacacagtctcacctcgccttgttttctttttgtcaatcagaacgaaagcgagttgcgggtgacgcagatgtgcgtgtatccactcgtgaatgcgttatcgttctgtatgccgctagagtgctggactgttgctgtctgcccacgacagcagacaactttccttctatgcacttgcaggatt

SEQ ID NO: 151 - DNA, 37 bp, artificial sequence
  primer
aataccgcatcaggcgcctagaacctgttaaaaatat

SEQ ID NO: 152 - DNA, 48 bp, artificial sequence
  primer
aaaacgtcgtgagacagtttggtgagatatcttcaaaagatatatagc

SEQ ID NO: 153 - DNA, 4285 bp, artificial sequence
  plasmid
gtaccgggccccccctcgaggtcgacggtatcgataagcttgatatcgaattcctgcagcccccgagacgcgtgttctaaccacaaaccttgagacgcgtgttccaaccacgcaccctgacacgcgtgttccaaccacgcaccctgagacgcgtgttctaaccacgcaccctgagacgcgtgttctaaccacgcaccctgagacgcgtgttctgccgcacaatgtgcacctgtaggaagctgtagtcactgctgattctcactgttctcggcaagggccgacgaccggagtacagtttttgtgggcagagccgttgtgcagctttccgttcttctcggttgtgtcacatgtgtcattgtcgtgtaaacacacggttgtatgtcggtttcgctgcaccacttcattatttcttctggttttttgacgagtatgcatcccaagaagaagaggaaggtggccaataccaaatataacaaagagttcctgctgtacctggccggctttgtggacggtgacggtagcatcatcgctcagattaaaccaaaccagtcttataagtttaaacatcagctaagcttgacctttcaggtgactcaaaagacccagcgccgttggtttctggacaaactagtggatgaaattggcgttggttacgtacgtgatcgcggatccgtttccgattacattttaagcgaaatcaagccgctgcacaacttcctgactcaactgcagccgtttctgaaactgaaacagaaacaggcaaacctggttctgaaaattatcgaacagctgccgtctgcaaaagaatccccggacaaattcctggaagtttgtacctgggtggatcagattgcagctctgaacgattctaagacgcgtaaaaccacttctgaaaccgttcgtgctgtgctggacagcctgagcgagaagaagaaatcctccccggcggccgattaattaatcaccgttgtgctcacttctcaaatcgacaaaggaaacacacttcgtgcagcatgtgccccattataaagaaactgagttgttccgttgtggcttgcaggtgtcacatccacaaaaaccggccgactctaaataggagtgtttcgcagcaagcagcgaaagtttatgactgggtccgaatctctgaacggatgtgtggcggacctggctgatgttgatcgccgtcgacacacgcgccacatgggtcaatacacaagacagctatcagttgttttagtcgaaccggttaacacaattcttgcccccccgagggggatccactagttctagagctagaacctgttaaaaatataatccacaattctgactaggactaaaaatttattttaaataatcttatacgccattagctatatatcttttgaagatatctcagaagcataagacgtcagctgccatggcgcccgggccctccagcttttgttccctttagtgagggttaatttcgagcttggcgtaatcatggtcatagctgtttcctgtgtgaaattgttatccgctcacaattccacacaacatacgagccggaagcataaagtgtaaagcctggggtgcctaatgagtgagctaactcacattaattgcgttgcgctcactgcccgctttccagtcgggaaacctgtcgtgccagctgcattaatgaatcggccaacgcgcggggagaggcggtttgcgtattgggcgctcttccgcttcctcgctcactgactcgctgcgctcggtcgttcggctgcggcgagcggtatcagctcactcaaaggcggtaatacggttatccacagaatcaggggataacgcaggaaagaacatgtgagcaaaaggccagcaaaaggccaggaaccgtaaaaaggccgcgttgctggcgtttttccataggctccgcccccctgacgagcatcacaaaaatcgacgctcaagtcagaggtggcgaaacccgacaggactataaagataccaggcgtttccccctggaagctccctcgtgcgctctcctgttccgaccctgccgcttaccggatacctgtccgcctttctcccttcgggaagcgtggcgctttctcatagctcacgctgtaggtatctcagttcggtgtaggtcgttcgctccaagctgggctgtgtgcacgaaccccccgttcagcccgaccgctgcgccttatccggtaactatcgtcttgagtccaacccggtaagacacgacttatcgccactggcagcagccactggtaacaggattagcagagcgaggtatgtaggcggtgctacagagttcttgaagtggtggcctaactacggctacactagaagaacagtatttggtatctgcgctctgctgaagccagttaccttcggaaaaagagttggtagctcttgatccggcaaacaaaccaccgctggtagcggtggtttttttgtttgcaagcagcagattacgcgcagaaaaaaaggatctcaagaagatcctttgatcttttctacggggtctgacgctcagtggaacgaaaactcacgttaagggattttggtcatgagattatcaaaaaggatcttcacctagatccttttaaattaaaaatgaagttttaaatcaatctaaagtatatatgagtaaacttggtctgacagttaccaatgcttaatcagtgaggcacctatctcagcgatctgtctatttcgttcatccatagttgcctgactccccgtcgtgtagataactacgatacgggagggcttaccatctggccccagtgctgcaatgataccgcgagacccacgctcaccggctccagatttatcagcaataaaccagccagccggaagggccgagcgcagaagtggtcctgcaactttatccgcctccatccagtctattaattgttgccgggaagctagagtaagtagttcgccagttaatagtttgcgcaacgttgttgccattgctacaggcatcgtggtgtcacgctcgtcgtttggtatggcttcattcagctccggttcccaacgatcaaggcgagttacatgatcccccatgttgtgcaaaaaagcggttagctccttcggtcctccgatcgttgtcagaagtaagttggccgcagtgttatcactcatggttatggcagcactgcataattctcttactgtcatgccatccgtaagatgcttttctgtgactggtgagtactcaaccaagtcattctgagaatagtgtatgcggcgaccgagttgctcttgcccggcgtcaatacgggataataccgcgccacatagcagaactttaaaagtgctcatcattggaaaacgttcttcggggcgaaaactctcaaggatcttaccgctgttgagatccagttcgatgtaacccactcgtgcacccaactgatcttcagcatcttttactttcaccagcgtttctgggtgagcaaaaacaggaaggcaaaatgccgcaaaaaagggaataagggcgacacggaaatgttgaatactcatactcttcctttttcaatattattgaagcatttatcagggttattgtctcatgagcggatacatatttgaatgtatttagaaaaataaacaaataggggttccgcgcacatttccccgaaaagtgccacctaaattgtaagcgttaatattttgttaaaattcgcgttaaatttttgttaaatcagctcattttttaaccaataggccgaaatcggcaaaatcccttataaatcaaaagaatagaccgagatagggttgagtgttgttccagtttggaacaagagtccactattaaagaacgtggactccaacgtcaaagggcgaaaaaccgtctatcagggcgatggcccactacgtgaaccatcaccctaatcaagttttttggggtcgaggtgccgtaaagcactaaatcggaaccctaaagggagcccccgatttagagcttgacggggaaagccggcgaacgtggcgagaaaggaagggaagaaagcgaaaggagcgggcgctagggcgctggcaagtgtagcggtcacgctgcgcgtaaccaccacacccgccgcgcttaatgcgccgctacagggcgcgtcccattcgccattcaggctgcgcaactgttgggaagggcgatcggtgcgggcctcttcgctattacgccagctggcgaaagggggatgtgctgcaaggcgattaagttgggtaacgccagggttttcccagtcacgacgttgtaaaacgacggccagtgaattgtaatacgactcactatagggcgaattgg

SEQ ID NO: 154 - DNA, 44 bp, artificial sequence
  primer
gtctcacgacgttttgaacccagaagcttcgccaggctgtaaat

SEQ ID NO: 155 - DNA, 18 bp, artificial sequence
  primer
cggatatggttacacgtg

SEQ ID NO: 156 - DNA, 8364 bp, artificial sequence
  plasmid
tgtctttatcctggattacgaccaatcgcccgccggctgccgggacgccctgctgcaacttacctccgggatggtccagacccacgtcaccaccccaggctccataccgacgatctgcgacctggcgcgcacgtttgcccgggagatgggggaggctaactaacggaaatacagaagctgcccgtctctcgttttcctctcttttcggagggatcagggagagtgcctcgggtcggagagagctgacgagggggtgccagagacccctgtgtcctttatcgaagaaaagggatgactcttcatgtggcatttcacacagtctcacctcgccttgttttctttttgtcaatcagaacgaaagcgagttgcgggtgacgcagatgtgcgtgtatccactcgtgaatgcgttatcgttctgtatgccgctagagtgctggactgttgctgtctgcccacgacagcagacaactttccttctatgcacttgcaggattctagactgggttcaaaacgtcgtgagacagtttggctaaaaatttattttaaataatcttatacgccattagctatatatcttttgaagatatctcagaagcataagacgtcagctgccatggcgcccgggccctcctaggttggcgcgcctcgggggggcaagaattgtgttaaccggttcgactaaaacaactgatagctgtcttgtgtattgacccatgtggcgcgtgtgtcgacggcgatcaacatcagccaggtccgccacacatccgttcagagattcggacccagtcataaactttcgctgcttgctgcgaaacactcctatttagagtcggccggtttttgtggatgtgacacctgcaagccacagcggaacaactcagtttctttataatggggcacatgctgcacgaagtgtgtttcctttgtcgatttgagaagtgagcacaacggtgattaattaaaaccatggaagcggccgcaacttaagaattttgtttaaacagggaattcaagaaaaaatgccaacgagtagttttccgcaagaacttcacacaaggtgattgtgtaacaccgtttggtggatgtcttctgcgcgggttgcgtcgtcagggacggcgaacgagtgcttgttctctacgagactcgcaaagagaaggaaagggcgaaattcaagagagaatccaacaaggaggactctctgctaatattcgccgcctttaacacatctaaaagttcacagagaacaaacaaaatgtttctgacacatccccttcgtgcgcgcgcatctccaccggtccaaccaggatcaccaaccgcacccaatgcaggcaagcttaaccacaaaccttgagacgcgtgttccaaccacgcaccctgacacgcgtgttccaaccacgcaccctgagacgcgtgttctaaccacgcaccctgagacgcgtgttctaaccacgcaccctgagacgcgtgttcaagcttatcgatactagtttttcgaatagtatacttctagaggatccccgggtaccgagctcgaattcgtaatcatggtcatagctgtttcctgtgtgaaattgttatccgctcacaattccacacaacatacgagccggaagcataaagtgtaaagcctggggtgcctaatgagtgagctaactcacattaattgcgttgcgctcactgcccgctttccagtcgggaaacctgtcgtgccagctgcattaatgaatcggccaacgcgcggggagaggcggtttgcgtattgggcgctcttccgcttcctcgctcactgactcgctgcgctcggtcgttcggctgcggcgagcggtatcagctcactcaaaggcggtaatacggttatccacagaatcaggggataacgcaggaaagaacatgtgagcaaaaggccagcaaaaggccaggaaccgtaaaaaggccgcgttgctggcgtttttccataggctccgcccccctgacgagcatcacaaaaatcgacgctcaagtcagaggtggcgaaacccgacaggactataaagataccaggcgtttccccctggaagctccctcgtgcgctctcctgttccgaccctgccgcttaccggatacctgtccgcctttctcccttcgggaagcgtggcgctttctcaaagctcacgctgtaggtatctcagttcggtgtaggtcgttcgctccaagctgggctgtgtgcacgaaccccccgttcagcccgaccgctgcgccttatccggtaactatcgtcttgagtccaacccggtaagacacgacttatcgccactggcagcagccactggtaacaggattagcagagcgaggtatgtaggcggtgctacagagttcttgaagtggtggcctaactacggctacactagaagaacagtatttggtatctgcgctctgctgaagccagttaccttcggaaaaagagttggtagctcttgatccggcaaacaaaccaccgctggtagcggtggtttttttgtttgcaagcagcagattacgcgcagaaaaaaaggatctcaagaagatcctttgatcttttctacggggtctgacgctcagtggaacgaaaactcacgttaagggattttggtcatgagattatcaaaaaggatcttcacctagatccttttaaattaaaaatgaagttttaaatcaatctaaagtatatatgagtaaacttggtctgacagttaccaatgcttaatcagtgaggcacctatctcagcgatctgtctatttcgttcatccatagttgcctgactccccgtcgtgtagataactacgatacgggagggcttaccatctggccccagtgctgcaatgataccgcgagacccacgctcaccggctccagatttatcagcaataaaccagccagccggaagggccgagcgcagaagtggtcctgcaactttatccgcctccatccagtctattaattgttgccgggaagctagagtaagtagttcgccagttaatagtttgcgcaacgttgttgccattgctacaggcatcgtggtgtcacgctcgtcgtttggtatggcttcattcagctccggttcccaacgatcaaggcgagttacatgatcccccatgttgtgcaaaaaagcggttagctccttcggtcctccgatcgttgtcagaagtaagttggccgcagtgttatcactcatggttatggcagcactgcataattctcttactgtcatgccatccgtaagatgcttttctgtgactggtgagtactcaaccaagtcattctgagaatagtgtatgcggcgaccgagttgctcttgcccggcgtcaatacgggataataccgcgccacatagcagaactttaaaagtgctcatcattggaaaacgttcttcggggcgaaaactctcaaggatcttaccgctgttgagatccagttcgatgtaacccactcgtgcacccaactgatcttcagcatcttttactttcaccagcgtttctgggtgagcaaaaacaggaaggcaaaatgccgcaaaaaagggaataagggcgacacggaaatgttgaatactcatactcttcctttttcaatattattgaagcatttatcagggttattgtctcatgagcggatacatatttgaatgtatttagaaaaataaacaaataggggttccgcgcacatttccccgaaaagtgccacctgacgtctaagaaaccattattatcatgacattaacctataaaaataggcgtatcacgaggccctttcgtctcgcgcgtttcggtgatgacggtgaaaacctctgacacatgcagctcccggagacggtcacagcttgtctgtaagcggatgccgggagcagacaagcccgtcagggcgcgtcagcgggtgttggcgggtgtcggggctggcttaactatgcggcatcagagcagattgtactgagagtgcaccatatgcggtgtgaaataccgcacagatgcgtaaggagaaaataccgcatcaggcgcctagaacctgttaaaaatataatccacaattctgactaggactaaaaatttattttaaataatcttatacgccattagctatatatcttttgaagatatctcaccaaactgtctcacgacgttttgaacccagaagcttcgccaggctgtaaatcccgtgagtcgtcctcacaaatcatcaagcaggtgtcctcagggagactgcctgactgagttatgctaattcctttctactttggcgtggtcacgtgtaaccatatccgaatcatttctctagccctacgaacaggtaagagcgctagggatgtccgtggagtagtgtgcttactcgataatattcagttgggactaccagcgaggcgctcgctttgctcacgcaatgcctgagacagttgcagaatgaatggtaaccgacaaacgcgttcatatgcgttttcaaacttagtagacgcgtactgtctgaaactggcggtcacaggcaccagataacgcccttggcatcggcatgtctcgtacagaggtccgtatgtagtgccacgacttctaaatccggcgacaggctggtcttttgtcttaccacgtattagcccgcgtgcgatttctcggagcgcacctgttcaacactagaaaacggagtttcctgatcgagaagccaccacctttccagaagttgaacgctagcatgtcattcgattttcaccccccgcgtagttcctgtgtgtcattcgttgtcgagacaactctgtcccgccccggtgctgttccatatgcgtgactttcccgcaattttttcagactttcaggaaagacaggctccggaacgatctcgtccatgactggtaaatccacgacaccgcaatggcccccagcacctctatctctcgtgccaggggactaacgttgtatgcgtctgcgtcttgtctttttgcattcgctttccaaaaaagagagccatccgttcccccgcacattcaacgccgcgagtgcggtttttgtcttttttgagtggtaggacgcttttcatgcgcgaactacgtggacattaagttccattctctttttcgacagcacgaaaccttgcattcaaacccgcccgcggaagatccgatcttgctgctgttcgcagtcccagtagcgtcctgtcggccgcgccgtctctgttggtgggcagccgctacacctgttatctgactgccgtgcgcgaaaatgacgccatttttgggaaaatcggggaacttcattctttaaaagtatgcggaggtttcctttttcttctgttcgtttctttttctcgggtttgataaccgtgttcgatgtaagcactttccgtctctcctccgtgctttgttcgacatcgagaccaggtgtgcagatccttcgcttgtcgatccggagacgcgtgtctcgtagaaccttttcattttaccacacggcagtgcggagcactgctctgagtgcagcagggacgggtgaagtttcgctttagtagtgcgtttctgctctacggggcgttgtcgtgtctgggaagatgcagaaaccggtgtgtctggtcgtcgcgatgacccccaagaggggcatcggcatcaacaacggcctcccgtggccccacttgaccacagatttcaaacactttcgtcgtgtgacaaaaacgacgcccgaagaagccagtcgcctgaacgggtggcttcccaggaaatttgcaaagacgggcgactctggacttccctctccatcagtcggcaagagattcaacgccgttgtcatgggacggaaaaactgggaaagcatgcctcgaaagtttagacccctcgtggacagattgaacatcgtcgtttcctcttccctcaaagaagaagacattgcggcggagaagcctcaagctgaaggccagcagcgcgtccgagtctgtgcttcactcccagcagctctcagccttctggaggaagagtacaaggattctgtcgaccagatttttgtcgtgggaggagcgggactgtacgaggcagcgctgtctctgggcgttgcctctcacctgtacatcacgcgtgtagcccgcgagtttccgtgcgacgttttcttccctgcgttccccggagatgacattctttcaaacaaatcaactgctgcgcaggctgcagctcctgccgagtctgtgttcgttcccttttgtccggagctcggaagagagaaggacaatgaagcgacgtatcgacccatcttcatttccaagaccttctcagacaacggggtaccctacgactccgtggttctcgagaagagaaggaagactgacgacgcagccactgcggaaccgagcaacgcaatgagctccttgacgtccacgagggagacaactcccgtgcacgggttgcaggctccttcttcggccgcagccattgccccggtgttggcgtggatggacgaagaagaccggaaaaaacgcgagcaaaaggaactgattcgggccgttccgcatgttcactttagaggccatgaagaattccagtaccttgatctcattgccgacattattaacaatggaaggacaatggatgaccgaacgggcgttggtgtcatctccaaattcggctgcactatgcgctactcgctggatcaggcctttccacttctcaccacaaagcgtgtgttctggaaaggggtcctcgaagagttgctgtggttcattcgcggcgacacgaacgcaaaccatctttctgagaagggcgtgaagatctgggacaagaatgtgacacgcgagttcctcgattcgcgcaatctcccccaccgagaggtcggagacatcggcccgggctacggcttccagtggagacacttcggcgcggcatacaaagacatgcacacagactacacagggcagggcgtcgaccagctgaagaatgtgatccagatgctgagaacgaatccaacagatcgtcgcatgctcatgactgcctggaatcctgcagcgctggacgaaatggcgctgccgccttgtcacttgttgtgccagttctacgtgaacgaccagaaggagctgtcgtgcatcatgtatcagcggtcgtgcgatgtcggcctcggcgtccccttcaacatcgcttcctattcgcttttgacgctcatggttgcacacgtctgcaacctaaaacctaaggagttcattcacttcatggggaacacgcatgtctacacgaaccatgtcgaggctttaaaagagcagctgcggagagaaccgagaccgttccccattgtgaacatcctcaacaaggaacgcatcaaggaaatcgacgatttcaccgccgaggattttgaggtcgtgggctacgtcccgcacggacgaatccagatggagatggctgtcgaggtccatactaaccaggatccacttgacatggcttcgtacccctgccatcaacacgcgtctgcgttcgaccaggctgcgcgttctcgcggccataacaaccgacgtacggcgttgcgccctcgccggcaacaaaaagccacggaagtccgcctggagcagaaaatgcccacgctactgcgggtttatatagacggtccccacgggatggggaaaaccaccaccacgcaactgctggtggccctgggttcgcgcgacgatatcgtctacgtacccgagccgatgacttactggcgggtgttgggggcttccgagacaatcgcgaacatctacaccacacaacaccgcctcgaccagggtgagatatcggccggggacgcggcggtggtaatgacaagcgcccagataacaatgggcatgccttatgccgtgaccgacgccgttctggctcctcatatcgggggggaggctgggagctcacatgccccgcccccggccctcaccctcatcttcgaccgccatcccatcgccgccctcctgtgctacccggccgcgcgataccttatgggcagcatgaccccccaggccgtgctggcgttcgtggccctcatcccgccgaccttgcccggcacaaacatcgtgttgggggcccttccggaggacagacacatcgaccgcctggccaaacgccagcgccccggcgagcggcttgacctggctatgctggccgcgattcgccgcgtttatgggctgcttgccaatacggtgcggtatctgcagggcggcgggtcgtggcgggaggattggggacagctttcgggggcggccgtgccgccccagggtgccgagccccagagcaacgcgggcccacgaccccatatcggggacacgttatttaccctgtttcgggcccccgagttgctggcccccaacggcgacctgtataacgtgtttgcctgggctttggacgtcttggccaaacgcctccgtcccatgca

SEQ ID NO: 157 - DNA, 280 bp, artificial sequence
  sequence alpha beta IcreI
aataccgcatcaggcgcctagaacctgttaaaaatataatccacaattctgactaggactaaaaatttattttaaataatcttatacgccattagctatatatcttttgaagatatctcaccaaactgtctcacgacgttttgaacccagaagcttcgccaggctgtaaatcccgtgagtcgtcctcacaaatcatcaagcaggtgtcctcagggagactgcctgactgagttatgctaattcctttctactttggcgtggtcacgtgtaaccatatccg

SEQ ID NO: 158 - DNA, 9700 bp, artificial sequence
  plasmid
ctagaggatccccgggtaccgagctcgaattcgtaatcatggtcatagctgtttcctgtgtgaaattgttatccgctcacaattccacacaacatacgagccggaagcataaagtgtaaagcctggggtgcctaatgagtgagctaactcacattaattgcgttgcgctcactgcccgctttccagtcgggaaacctgtcgtgccagctgcattaatgaatcggccaacgcgcggggagaggcggtttgcgtattgggcgctcttccgcttcctcgctcactgactcgctgcgctcggtcgttcggctgcggcgagcggtatcagctcactcaaaggcggtaatacggttatccacagaatcaggggataacgcaggaaagaacatgtgagcaaaaggccagcaaaaggccaggaaccgtaaaaaggccgcgttgctggcgtttttccataggctccgcccccctgacgagcatcacaaaaatcgacgctcaagtcagaggtggcgaaacccgacaggactataaagataccaggcgtttccccctggaagctccctcgtgcgctctcctgttccgaccctgccgcttaccggatacctgtccgcctttctcccttcgggaagcgtggcgctttctcaaagctcacgctgtaggtatctcagttcggtgtaggtcgttcgctccaagctgggctgtgtgcacgaaccccccgttcagcccgaccgctgcgccttatccggtaactatcgtcttgagtccaacccggtaagacacgacttatcgccactggcagcagccactggtaacaggattagcagagcgaggtatgtaggcggtgctacagagttcttgaagtggtggcctaactacggctacactagaagaacagtatttggtatctgcgctctgctgaagccagttaccttcggaaaaagagttggtagctcttgatccggcaaacaaaccaccgctggtagcggtggtttttttgtttgcaagcagcagattacgcgcagaaaaaaaggatctcaagaagatcctttgatcttttctacggggtctgacgctcagtggaacgaaaactcacgttaagggattttggtcatgagattatcaaaaaggatcttcacctagatccttttaaattaaaaatgaagttttaaatcaatctaaagtatatatgagtaaacttggtctgacagttaccaatgcttaatcagtgaggcacctatctcagcgatctgtctatttcgttcatccatagttgcctgactccccgtcgtgtagataactacgatacgggagggcttaccatctggccccagtgctgcaatgataccgcgagacccacgctcaccggctccagatttatcagcaataaaccagccagccggaagggccgagcgcagaagtggtcctgcaactttatccgcctccatccagtctattaattgttgccgggaagctagagtaagtagttcgccagttaatagtttgcgcaacgttgttgccattgctacaggcatcgtggtgtcacgctcgtcgtttggtatggcttcattcagctccggttcccaacgatcaaggcgagttacatgatcccccatgttgtgcaaaaaagcggttagctccttcggtcctccgatcgttgtcagaagtaagttggccgcagtgttatcactcatggttatggcagcactgcataattctcttactgtcatgccatccgtaagatgcttttctgtgactggtgagtactcaaccaagtcattctgagaatagtgtatgcggcgaccgagttgctcttgcccggcgtcaatacgggataataccgcgccacatagcagaactttaaaagtgctcatcattggaaaacgttcttcggggcgaaaactctcaaggatcttaccgctgttgagatccagttcgatgtaacccactcgtgcacccaactgatcttcagcatcttttactttcaccagcgtttctgggtgagcaaaaacaggaaggcaaaatgccgcaaaaaagggaataagggcgacacggaaatgttgaatactcatactcttcctttttcaatattattgaagcatttatcagggttattgtctcatgagcggatacatatttgaatgtatttagaaaaataaacaaataggggttccgcgcacatttccccgaaaagtgccacctgacgtctaagaaaccattattatcatgacattaacctataaaaataggcgtatcacgaggccctttcgtctcgcgcgtttcggtgatgacggtgaaaacctctgacacatgcagctcccggagacggtcacagcttgtctgtaagcggatgccgggagcagacaagcccgtcagggcgcgtcagcgggtgttggcgggtgtcggggctggcttaactatgcggcatcagagcagattgtactgagagtgcaccatatgcggtgtgaaataccgcacagatgcgtaaggagaaaataccgcatcaggcgccgaaggcgtaactcaggacggcttgcgctcatcgcagaacaggggtggtgcctgcattgggtgcggttggtgatcctggttggaccggtggagatgcgcgcgcacgaaggggatgtgtcagaaacattttgtttgttctctgtgaacttttagatgtgttaaaggcggcgaatattagcagagagtcctccttgttggattctctcttgaatttcgccctttccttctctttgcgagtctcgtagagaacaagcactcgttcgccgtccctgacgacgcaacccgcgcagaagacatccaccaaacggtgttacacaatcaccttgtgtgaagttcttgcggaaaactactcgttggcattttttcttgaattccctttttcgacaaaatgcatgagaaaaaaatcactggatataccaccgttgatatatcccaatcgcatcgtaaagaacattttgaggcatttcagtcagttgctcaatgtacctataaccagaccgttcagctggatattacggcctttttaaagaccgtaaagaaaaataagcacaagttttatccggcctttattcacattcttgcccgcctgatgaatgctcatccggaattccgtatggcaatgaaagacggtgagctggtgatatgggatagtgttcacccttgttacaccgttttccatgagcaaactgaaacgttttcatcgctctggagtgaataccacgacgatttccggcagtttctacacatatattcgcaagatgtggcgtgttacggtgaaaacctggcctatttccctaaagggtttattgagaatatgtttttcgtctcagccaatccctgggtgagtttcaccagttttgatttaaacgtggccaatatggacaacttcttcgcccccgttttcaccatgggcaaatattatacgcaaggcgacaaggtgctgatgccgctggcgattcaggttcatcatgccgtctgtgatggcttccatgtcggcagaatgcttaatgaattacaacagtactgcgatgagtggcagggcggggctcctaggatggtgagcaagggcgaggagctgttcaccggggtggtgcccatcctggtcgagctggacggcgacgtaaacggccacaagttcagcgtgtccggcgagggcgagggcgatgccacccaaactgtctcacgacgttttgaacccaggcgccattcgccattcaggctgcgcaactgttgggaagggcgatcggtgcgggcctcttcgctattacgccagctggcgaaagggggatgtgctgcaaggcgattaagttgggtaacgccagggttttcccagtcacgacgttgtaaaacgacggccagtgccaagcttcgccaggctgtaaatcccgtgagtcgtcctcacaaatcatcaagcaggtgtcctcagggagactgcctgactgagttatgctaattcctttctactttggcgtggtcacgtgtaaccatatccgaatcatttctctagccctacgaacaggtaagagcgctagggatgtccgtggagtagtgtgcttactcgataatattcagttgggactaccagcgaggcgctcgctttgctcacgcaatgcctgagacagttgcagaatgaatggtaaccgacaaacgcgttcatatgcgttttcaaacttagtagacgcgtactgtctgaaactggcggtcacaggcaccagataacgcccttggcatcggcatgtctcgtacagaggtccgtatgtagtgccacgacttctaaatccggcgacaggctggtcttttgtcttaccacgtattagcccgcgtgcgatttctcggagcgcacctgttcaacactagaaaacggagtttcctgatcgagaagccaccacctttccagaagttgaacgctagcatgtcattcgattttcaccccccgcgtagttcctgtgtgtcattcgttgtcgagacaactctgtcccgccccggtgctgttccatatgcgtgactttcccgcaattttttcagactttcaggaaagacaggctccggaacgatctcgtccatgactggtaaatccacgacaccgcaatggcccccagcacctctatctctcgtgccaggggactaacgttgtatgcgtctgcgtcttgtctttttgcattcgctttccaaaaaagagagccatccgttcccccgcacattcaacgccgcgagtgcggtttttgtcttttttgagtggtaggacgcttttcatgcgcgaactacgtggacattaagttccattctctttttcgacagcacgaaaccttgcattcaaacccgcccgcggaagatccgatcttgctgctgttcgcagtcccagtagcgtcctgtcggccgcgccgtctctgttggtgggcagccgctacacctgttatctgactgccgtgcgcgaaaatgacgccatttttgggaaaatcggggaacttcattctttaaaagtatgcggaggtttcctttttcttctgttcgtttctttttctcgggtttgataaccgtgttcgatgtaagcactttccgtctctcctccgtgctttgttcgacatcgagaccaggtgtgcagatccttcgcttgtcgatccggagacgcgtgtctcgtagaaccttttcattttaccacacggcagtgcggagcactgctctgagtgcagcagggacgggtgaagtttcgctttagtagtgcgtttctgctctacggggcgttgtcgtgtctgggaagatgcagaaaccggtgtgtctggtcgtcgcgatgacccccaagaggggcatcggcatcaacaacggcctcccgtggccccacttgaccacagatttcaaacactttcgtcgtgtgacaaaaacgacgcccgaagaagccagtcgcctgaacgggtggcttcccaggaaatttgcaaagacgggcgactctggacttccctctccatcagtcggcaagagattcaacgccgttgtcatgggacggaaaaactgggaaagcatgcctcgaaagtttagacccctcgtggacagattgaacatcgtcgtttcctcttccctcaaagaagaagacattgcggcggagaagcctcaagctgaaggccagcagcgcgtccgagtctgtgcttcactcccagcagctctcagccttctggaggaagagtacaaggattctgtcgaccagatttttgtcgtgggaggagcgggactgtacgaggcagcgctgtctctgggcgttgcctctcacctgtacatcacgcgtgtagcccgcgagtttccgtgcgacgttttcttccctgcgttccccggagatgacattctttcaaacaaatcaactgctgcgcaggctgcagctcctgccgagtctgtgttcgttcccttttgtccggagctcggaagagagaaggacaatgaagcgacgtatcgacccatcttcatttccaagaccttctcagacaacggggtaccctacgactccgtggttctcgagaagagaaggaagactgacgacgcagccactgcggaaccgagcaacgcaatgagctccttgacgtccacgagggagacaactcccgtgcacgggttgcaggctccttcttcggccgcagccattgccccggtgttggcgtggatggacgaagaagaccggaaaaaacgcgagcaaaaggaactgattcgggccgttccgcatgttcactttagaggccatgaagaattccagtaccttgatctcattgccgacattattaacaatggaaggacaatggatgaccgaacgggcgttggtgtcatctccaaattcggctgcactatgcgctactcgctggatcaggcctttccacttctcaccacaaagcgtgtgttctggaaaggggtcctcgaagagttgctgtggttcattcgcggcgacacgaacgcaaaccatctttctgagaagggcgtgaagatctgggacaagaatgtgacacgcgagttcctcgattcgcgcaatctcccccaccgagaggtcggagacatcggcccgggctacggcttccagtggagacacttcggcgcggcatacaaagacatgcacacagactacacagggcagggcgtcgaccagctgaagaatgtgatccagatgctgagaacgaatccaacagatcgtcgcatgctcatgactgcctggaatcctgcagcgctggacgaaatggcgctgccgccttgtcacttgttgtgccagttctacgtgaacgaccagaaggagctgtcgtgcatcatgtatcagcggtcgtgcgatgtcggcctcggcgtccccttcaacatcgcttcctattcgcttttgacgctcatggttgcacacgtctgcaacctaaaacctaaggagttcattcacttcatggggaacacgcatgtctacacgaaccatgtcgaggctttaaaagagcagctgcggagagaaccgagaccgttccccattgtgaacatcctcaacaaggaacgcatcaaggaaatcgacgatttcaccgccgaggattttgaggtcgtgggctacgtcccgcacggacgaatccagatggagatggctgtcgaggtccatactaaccaggatccacttgacatggcttcgtacccctgccatcaacacgcgtctgcgttcgaccaggctgcgcgttctcgcggccataacaaccgacgtacggcgttgcgccctcgccggcaacaaaaagccacggaagtccgcctggagcagaaaatgcccacgctactgcgggtttatatagacggtccccacgggatggggaaaaccaccaccacgcaactgctggtggccctgggttcgcgcgacgatatcgtctacgtacccgagccgatgacttactggcgggtgttgggggcttccgagacaatcgcgaacatctacaccacacaacaccgcctcgaccagggtgagatatcggccggggacgcggcggtggtaatgacaagcgcccagataacaatgggcatgccttatgccgtgaccgacgccgttctggctcctcatatcgggggggaggctgggagctcacatgccccgcccccggccctcaccctcatcttcgaccgccatcccatcgccgccctcctgtgctacccggccgcgcgataccttatgggcagcatgaccccccaggccgtgctggcgttcgtggccctcatcccgccgaccttgcccggcacaaacatcgtgttgggggcccttccggaggacagacacatcgaccgcctggccaaacgccagcgccccggcgagcggcttgacctggctatgctggccgcgattcgccgcgtttatgggctgcttgccaatacggtgcggtatctgcagggcggcgggtcgtggcgggaggattggggacagctttcgggggcggccgtgccgccccagggtgccgagccccagagcaacgcgggcccacgaccccatatcggggacacgttatttaccctgtttcgggcccccgagttgctggcccccaacggcgacctgtataacgtgtttgcctgggctttggacgtcttggccaaacgcctccgtcccatgcatgtctttatcctggattacgaccaatcgcccgccggctgccgggacgccctgctgcaacttacctccgggatggtccagacccacgtcaccaccccaggctccataccgacgatctgcgacctggcgcgcacgtttgcccgggagatgggggaggctaactaacggaaatacagaagctgcccgtctctcgttttcctctcttttcggagggatcagggagagtgcctcgggtcggagagagctgacgagggggtgccagagacccctgtgtcctttatcgaagaaaagggatgactcttcatgtggcatttcacacagtctcacctcgccttgttttctttttgtcaatcagaacgaaagcgagttgcgggtgacgcagatgtgcgtgtatccactcgtgaatgcgttatcgttctgtatgccgctagagtgctggactgttgctgtctgcccacgacagcagacaactttccttctatgcacttgcaggattctagactgggttcaaaacgtcgtgagacagtttggaggagctgttcaccggggtggtgcccatcctggtcgagctggacggcgacgtaaacggccacaagttcagcgtgtccggcgagggcgagggcgatgccacctacggcaagctgaccctgaagttcatctgcaccaccggcaagctgcccgtgccctggcccaccctcgtgaccaccctgacctacggcgtgcagtgcttcagccgctaccccgaccacatgaagcagcacgacttcttcaagtccgccatgcccgaaggctacgtccaggagcgcaccatcttcttcaaggacgacggcaactacaagacccgcgccgaggtgaagttcgagggcgacaccctggtgaaccgcatcgagctgaagggcatcgacttcaaggaggacggcaacatcctggggcacaagctggagtacaactacaacagccacaacgtctatatcatggccgacaagcagaagaacggcatcaaggtgaacttcaagatccgccacaacatcgaggacggcagcgtgcagctcgccgaccactaccagcagaacacccccatcggcgacggccccgtgctgctgcccgacaaccactacctgagcacccagtccgccctgagcaaagaccccaacgagaagcgcgatcacatggtcctgctggagttcgtgaccgccgccgggatcactctcggcatggacgagctgtacaagtactcagatctcgagctcgctaggaatgcattagaggtccacacgaaccaggacccgctcgattaattaatcaccgttgtgctcacttctcaaatcgacaaaggaaacacacttcgtgcagcatgtgccccattataaagaaactgagttgttccgttgtggcttgcaggtgtcacatccacagaaaccggccgactctaaataggagtgtttcgcagcaagcagcgaaagtttatgactgggtccgaatctctgaacggatgtgtggcggacctggctgatgttgatcgccgtcgacacacgcgccacatgggtcaatacacaagacagctatcagttgttctagtcgaaccggttaacacaattcttgcccccccgaggg

SEQ ID NO: 159 - DNA, 18 bp, artificial sequence
  primer
cgcctccgtcccatgcat

SEQ ID NO: 160 - DNA, 20 bp, artificial sequence
  primer
ccaaactgtctcacgacgtt

SEQ ID NO: 161 - DNA, 42 bp, artificial sequence
  primer
cgtgagacagtttggctaaaaatttattttaaataatcttat

SEQ ID NO: 162 - DNA, 37 bp, artificial sequence
  primer
gaggcgcgccaacctaggagggcccgggcgccatggc

SEQ ID NO: 163 - DNA, 664 bp, artificial sequence
  sequence IcreI beta gamma
cgcctccgtcccatgcatgtctttatcctggattacgaccaatcgcccgccggctgccgggacgccctgctgcaacttacctccgggatggtccagacccacgtcaccaccccaggctccataccgacgatctgcgacctggcgcgcacgtttgcccgggagatgggggaggctaactaacggaaatacagaagctgcccgtctctcgttttcctctcttttcggagggatcagggagagtgcctcgggtcggagagagctgacgagggggtgccagagacccctgtgtcctttatcgaagaaaagggatgactcttcatgtggcatttcacacagtctcacctcgccttgttttctttttgtcaatcagaacgaaagcgagttgcgggtgacgcagatgtgcgtgtatccactcgtgaatgcgttatcgttctgtatgccgctagagtgctggactgttgctgtctgcccacgacagcagacaactttccttctatgcacttgcaggattctagactgggttcaaaacgtcgtgagacagtttggctaaaaatttattttaaataatcttatacgccattagctatatatcttttgaagatatctcagaagcataagacgtcagctgccatggcgcccgggccctcctaggttggcgcgcctc

SEQ ID NO: 164 - DNA, 9874 bp, artificial sequence
  plasmid
catgttctttcctgcgttatcccctgattctgtggataaccgtattaccgcctttgagtgagctgataccgctcgccgcagccgaacgaccgagcgcagcgagtcagtgagcgaggaagcggaagagcgcccaatacgcaaaccgcctctccccgcgcgttggccgattcattaatgcagctggcacgacaggtttcccgactggaaagcgggcagtgagcgcaacgcaattaatgtgagttagctcactcattaggcaccccaggctttacactttatgcttccggctcgtatgttgtgtggaattgtgagcggataacaatttcacacaggaaacagctatgaccatgattacgaattcgagctcggtacccggggatcctctagaagtatactattcgaaaaactagtatcgataagcttgaacacgcgtctcagggtgcgtggttagaacacgcgtctcagggtgcgtggttagaacacgcgtctcagggtgcgtggttggaacacgcgtgtcagggtgcgtggttggaacacgcgtctcaaggtttgtggttaagcttgcctgcattgggtgcggttggtgatcctggttggaccggtggagatgcgcgcgcacgaaggggatgtgtcagaaacattttgtttgttctctgtgaacttttagatgtgttaaaggcggcgaatattagcagagagtcctccttgttggattctctcttgaatttcgccctttccttctctttgcgagtctcgtagagaacaagcactcgttcgccgtccctgacgacgcaacccgcgcagaagacatccaccaaacggtgttacacaatcaccttgtgtgaagttcttgcggaaaactactcgttggcattttttcttgaattccctgtttaaacgacaaaatgtttccgaaggcagtgagacgcgccgtcacggcaggggtgtttgccgcgcccacactgatgtcgttcttgcgatgtggcgttatggcatcggatccccctcttgttgccaatcaagttgtcacctgcccagataaaaaatcgacagccgcggtcattctcacaccgacggagaaccacttcactctcaagtgccctaaaacagcgctcacagagcctcccactcttgcgtactcacccaacaggcaaatctgcccagcgggtactacaagtagctgtacatcaaaggctgtaacattgagctccttgattcctgaagcagaagatagctggtggacgggggattctgctagtctcgacacggcaggcatcaaactcacagttccaatcgagaagttccccgtgacaacgcagacgtttgtggtcggttgcatcaagggagacgacgcacagagttgtatggtcacagtgacagtacaagccagagcctcatcggtcgtcaataatgtcgcaaggtgctcctacggtgcagacagcactcttggtcctgtcaagttgtctgcggaaggacccactacaatgaccctcgtgtgcgggaaagatggagtcaaagttcctcaagacaacaatcagtactgttccgggacgacgctgactggttgcaacgagaaatcgttcaaagatattttgccaaaattaactgagaacccgtggcagggtaacgcttcgagtgataagggtgccacgctaacgatcaagaaggaagcatttccagccgagtcaaaaagcgtcattattggatgcacagggggatcgcctgagaagcatcactgtaccgtgaaactggagtttgccggggctgcacctaggtccttgctgactgaggtcgaaacacccatccgcaacgagtggggctcgagatctaacggcggcggaggcagtggtggtggcggcagcggaggggggggctctggtggaggaggttcttcgcttcttaccgaagtcgagacaccgatccgcaacgagtggggcagtagaagtaacggaggcggaggttccggaggcggtgggagcggaggcggcggatcgggcggtggagggtccagccttctcactgaagtggagaccccaactcgcagcgaatgggaatcgcgaagttcgggcggggggggaagcggaggaggtggctccggaggaggcggaagcggaggaggcggctcgagccttctgaccgaggtggaaaccccaacgaggaatgagtgggaatcgcgctcgtccggcggcggcggttctggtggtggcggctccggaggcggcggctctggcggcgggggatcctcgcttcttaccgaggttgagactctgactcgcaacggctggggttgtcgatgttcgggtaagcctatccctaaccctctcctcggtctcgattctacggctgcgggaacagccagtcacgtttccatttttgccatggtgatcggacttattggctctatcgcagcttgtgtcgcgtaagcggccgcttccatggttttaattaatcaccgttgtgctcacttctcaaatcgacaaaggaaacacacttcgtgcagcatgtgccccattataaagaaactgagttgttccgctgtggcttgcaggtgtcacatccacaaaaaccggccgactctaaataggagtgtttcgcagcaagcagcgaaagtttatgactgggtccgaatctctgaacggatgtgtggcggacctggctgatgttgatcgccgtcgacacacgcgccacatgggtcaatacacaagacagctatcagttgttttagtcgaaccggttaacacaattcttgcccccccgaggcgcgccaacctaggagggcccgggcgccatggcagctgacgtcttatgcttctgagatatcttcaaaagatatatagctaatggcgtataagattatttaaaataaatttttagccaaactgtctcacgacgttttgaacccagtctagaatcctgcaagtgcatagaaggaaagttgtctgctgtcgtgggcagacagcaacagtccagcactctagcggcatacagaacgataacgcattcacgagtggatacacgcacatctgcgtcacccgcaactcgctttcgttctgattgacaaaaagaaaacaaggcgaggtgagactgtgtgaaatgccacatgaagagtcatcccttttcttcgataaaggacacaggggtctctggcaccccctcgtcagctctctccgacccgaggcactctccctgatccctccgaaaagagaggaaaacgagagacgggcagcttctgtatttccgttagttagcctcccccatctcccgggcaaacgtgcgcgccaggtcgcagatcgtcggtatggagcctggggtggtgacgtgggtctggaccatcccggaggtaagttgcagcagggcgtcccggcagccggcgggcgattggtcgtaatccaggataaagacatgcatgggacggaggcgtttggccaagacgtccaaagcccaggcaaacacgttatacaggtcgccgttgggggccagcaactcgggggcccgaaacagggtaaataacgtgtccccgatatggggtcgtgggcccgcgttgctctggggctcggcaccctggggcggcacggccgcccccgaaagctgtccccaatcctcccgccacgacccgccgccctgcagataccgcaccgtattggcaagcagcccataaacgcggcgaatcgcggccagcatagccaggtcaagccgctcgccggggcgctggcgtttggccaggcggtcgatgtgtctgtcctccggaagggcccccaacacgatgtttgtgccgggcaaggtcggcgggatgagggccacgaacgccagcacggcctggggggtcatgctgcccataaggtatcgcgcggccgggtagcacaggagggcggcgatgggatggcggtcgaagatgagggtgagggccgggggcggggcatgtgagctcccagcctcccccccgatatgaggagccagaacggcgtcggtcacggcataaggcatgcccattgttatctgggcgcttgtcattaccaccgccgcgtccccggccgatatctcaccctggtcgaggcggtgttgtgtggtgtagatgttcgcgattgtctcggaagcccccaacacccgccagtaagtcatcggctcgggtacgtagacgatatcgtcgcgcgaacccagggccaccagcagttgcgtggtggtggttttccccatcccgtggggaccgtctatataaacccgcagtagcgtgggcattttctgctccaggcggacttccgtggctttttgttgccggcgagggcgcaacgccgtacgtcggttgttatggccgcgagaacgcgcagcctggtcgaacgcagacgcgtgttgatggcaggggtacgaagccatgtcaagtggatcctggttagtatggacctcgacagccatctccatctggattcgtccgtgcgggacgtagcccacgacctcaaaatcctcggcggtgaaatcgtcgatttccttgatgcgttccttgttgaggatgttcacaatggggaacggtctcggttctctccgcagctgctcttttaaagcctcgacatggttcgtgtagacatgcgtgttccccatgaagtgaatgaactccttaggttttaggttgcagacgtgtgcaaccatgagcgtcaaaagcgaataggaagcgatgttgaaggggacgccgaggccgacatcgcacgaccgctgatacatgatgcacgacagctccttctggtcgttcacgtagaactggcacaacaagtgacaaggcggcagcgccatttcgtccagcgctgcaggattccaggcagtcatgagcatgcgacgatctgttggattcgttctcagcatctggatcacattcttcagctggtcgacgccctgccctgtgtagtctgtgtgcatgtctttgtatgccgcgccgaagtgtctccactggaagccgtagcccgggccgatgtctccgacctctcggtgggggagattgcgcgaatcgaggaactcgcgtgtcacattcttgtcccagatcttcacgcccttctcagaaagatggtttgcgttcgtgtcgccgcgaatgaaccacagcaactcttcgaggacccctttccagaacacacgctttgtggtgagaagtggaaaggcctgatccagcgagtagcgcatagtgcagccgaatttggagatgacaccaacgcccgttcggtcatccattgtccttccattgttaataatgtcggcaatgagatcaaggtactggaattcttcatggcctctaaagtgaacatgcggaacggcccgaatcagttccttttgctcgcgttttttccggtcttcttcgtccatccacgccaacaccggggcaatggctgcggccgaagaaggagcctgcaacccgtgcacgggagttgtctccctcgtggacgtcaaggagctcattgcgttgctcggttccgcagtggctgcgtcgtcagtcttccttctcttctcgagaaccacggagtcgtagggtaccccgttgtctgagaaggtcttggaaatgaagatgggtcgatacgtcgcttcattgtccttctctcttccgagctccggacaaaagggaacgaacacagactcggcaggagctgcagcctgcgcagcagttgatttgtttgaaagaatgtcatctccggggaacgcagggaagaaaacgtcgcacggaaactcgcgggctacacgcgtgatgtacaggtgagaggcaacgcccagagacagcgctgcctcgtacagtcccgctcctcccacgacaaaaatctggtcgacagaatccttgtactcttcctccagaaggctgagagctgctgggagtgaagcacagactcggacgcgctgctggccttcagcttgaggcttctccgccgcaatgtcttcttctttgagggaagaggaaacgacgatgttcaatctgtccacgaggggtctaaactttcgaggcatgctttcccagtttttccgtcccatgacaacggcgttgaatctcttgccgactgatggagagggaagtccagagtcgcccgtctttgcaaatttcctgggaagccacccgttcaggcgactggcttcttcgggcgtcgtttttgtcacacgacgaaagtgtttgaaatctgtggtcaagtggggccacgggaggccgttgttgatgccgatgcccctcttgggggtcatcgcgacgaccagacacaccggtttctgcatcttcccagacacgacaacgccccgtagagcagaaacgcactactaaagcgaaacttcacccgtccctgctgcactcagagcagtgctccgcactgccgtgtggtaaaatgaaaaggttctacgagacacgcgtctccggatcgacaagcgaaggatctgcacacctggtctcgatgtcgaacaaagcacggaggagagacggaaagtgcttacatcgaacacggttatcaaacccgagaaaaagaaacgaacagaagaaaaaggaaacctccgcatacttttaaagaatgaagttccccgattttcccaaaaatggcgtcattttcgcgcacggcagtcagataacaggtgtagcggctgcccaccaacagagacggcgcggccgacaggacgctactgggactgcgaacagcagcaagatcggatcttccgcgggcgggtttgaatgcaaggtttcgtgctgtcgaaaaagagaatggaacttaatgtccacgtagttcgcgcatgaaaagcgtcctaccactcaaaaaagacaaaaaccgcactcgcggcgttgaatgtgcgggggaacggatggctctcttttttggaaagcgaatgcaaaaagacaagacgcagacgcatacaacgttagtcccctggcacgagagatagaggtgctgggggccattgcggtgtcgtggatttaccagtcatggacgagatcgttccggagcctgtctttcctgaaagtctgaaaaaattgcgggaaagtcacgcatatggaacagcaccggggcgggacagagttgtctcgacaacgaatgacacacaggaactacgcggggggtgaaaatcgaatgacatgctagcgttcaacttctggaaaggtggtggcttctcgatcaggaaactccgttttctagtgttgaacaggtgcgctccgagaaatcgcacgcgggctaatacgtggtaagacaaaagaccagcctgtcgccggatttagaagtcgtggcactacatacggacctctgtacgagacatgccgatgccaagggcgttatctggtgcctgtgaccgccagtttcagacagtacgcgtctactaagtttgaaaacgcatatgaacgcgtttgtcggttaccattcattctgcaactgtctcaggcattgcgtgagcaaagcgagcgcctcgctggtagtcccaactgaatattatcgagtaagcacactactccacggacatccctagcgctcttacctgttcgtagggctagagaaatgattcggatatggttacacgtgaccacgccaaagtagaaaggaattagcataactcagtcaggcagtctccctgaggacacctgcttgatgatttgtgaggacgactcacgggatttacagcctggcgaagcttctgggttcaaaacgtcgtgagacagtttggtgagatatcttcaaaagatatatagctaatggcgtataagattatttaaaataaatttttagtcctagtcagaattgtggattatatttttaacaggttctaggcgcctgatgcggtattttctccttacgcatctgtgcggtatttcacaccgcatatggtgcactctcagtacaatctgctctgatgccgcatagttaagccagccccgacacccgccaacacccgctgacgcgccctgacgggcttgtctgctcccggcatccgcttacagacaagctgtgaccgtctccgggagctgcatgtgtcagaggttttcaccgtcatcaccgaaacgcgcgagacgaaagggcctcgtgatacgcctatttttataggttaatgtcatgataataatggtttcttagacgtcaggtggcacttttcggggaaatgtgcgcggaacccctatttgtttatttttctaaatacattcaaatatgtatccgctcatgagacaataaccctgataaatgcttcaataatattgaaaaaggaagagtatgagtattcaacatttccgtgtcgcccttattcccttttttgcggcattttgccttcctgtttttgctcacccagaaacgctggtgaaagtaaaagatgctgaagatcagttgggtgcacgagtgggttacatcgaactggatctcaacagcggtaagatccttgagagttttcgccccgaagaacgttttccaatgatgagcacttttaaagttctgctatgtggcgcggtattatcccgtattgacgccgggcaagagcaactcggtcgccgcatacactattctcagaatgacttggttgagtactcaccagtcacagaaaagcatcttacggatggcatgacagtaagagaattatgcagtgctgccataaccatgagtgataacactgcggccaacttacttctgacaacgatcggaggaccgaaggagctaaccgcttttttgcacaacatgggggatcatgtaactcgccttgatcgttgggaaccggagctgaatgaagccataccaaacgacgagcgtgacaccacgatgcctgtagcaatggcaacaacgttgcgcaaactattaactggcgaactacttactctagcttcccggcaacaattaatagactggatggaggcggataaagttgcaggaccacttctgcgctcggcccttccggctggctggtttattgctgataaatctggagccggtgagcgtgggtctcgcggtatcattgcagcactggggccagatggtaagccctcccgtatcgtagttatctacacgacggggagtcaggcaactatggatgaacgaaatagacagatcgctgagataggtgcctcactgattaagcattggtaactgtcagaccaagtttactcatatatactttagattgatttaaaacttcatttttaatttaaaaggatctaggtgaagatcctttttgataatctcatgaccaaaatcccttaacgtgagttttcgttccactgagcgtcagaccccgtagaaaagatcaaaggatcttcttgagatcctttttttctgcgcgtaatctgctgcttgcaaacaaaaaaaccaccgctaccagcggtggtttgtttgccggatcaagagctaccaactctttttccgaaggtaactggcttcagcagagcgcagataccaaatactgttcttctagtgtagccgtagttaggccaccacttcaagaactctgtagcaccgcctacatacctcgctctgctaatcctgttaccagtggctgctgccagtggcgataagtcgtgtcttaccgggttggactcaagacgatagttaccggataaggcgcagcggtcgggctgaacggggggttcgtgcacacagcccagcttggagcgaacgacctacaccgaactgagatacctacagcgtgagctttgagaaagcgccacgcttcccgaagggagaaaggcggacaggtatccggtaagcggcagggtcggaacaggagagcgcacgagggagcttccagggggaaacgcctggtatctttatagtcctgtcgggtttcgccacctctgacttgagcgtcgatttttgtgatgctcgtcaggggggcggagcctatggaaaaacgccagcaacgcggcctttttacggttcctggccttttgctggccttttgctca

SEQ ID NO: 165 - protein, 505 aa, artificial sequence
  fusion protein
MFPKAVRRAVTAGVFAAPTLMSFLRCGVMASDPPLVANQVVTCPDKKSTAAVILTPTENHFTLKCPKTALTEPPTLAYSPNRQICPAGTTSSCTSKAVTLSSLIPEAEDSWWTGDSASLDTAGIKLTVPIEKFPVTTQTFVVGCIKGDDAQSCMVTVTVQARASSVVNNVARCSYGADSTLGPVKLSAEGPTTMTLVCGKDGVKVPQDNNQYCSGTTLTGCNEKSFKDILPKLTENPWQGNASSDKGATLTIKKEAFPAESKSVIIGCTGGSPEKHHCTVKLEFAGAAPRSLLTEVETPIRNEWGSRSNGGGGSGGGGSGGGGSGGGGSSLLTEVETPIRNEWGSRSNGGGGSGGGGSGGGGSGGGGSSLLTEVETPTRSEWESRSSGGGGSGGGGSGGGGSGGGGSSLLTEVETPTRNEWESRSSGGGGSGGGGSGGGGSGGGGSSLLTEVETLTRNGWGCRCSGKPIPNPLLGLDSTAAGTASHVSIFAMVIGLIGSIAACVA

SEQ ID NO: 166 - protein, 288 aa, Toxoplasma gondii
MFPKAVRRAVTAGVFAAPTLMSFLRCGVMASDPPLVANQVVTCPDKKSTAAVILTPTENHFTLKCPKTALTEPPTLAYSPNRQICPAGTTSSCTSKAVTLSSLIPEAEDSWWTGDSASLDTAGIKLTVPIEKFPVTTQTFVVGCIKGDDAQSCMVTVTVQARASSVVNNVARCSYGADSTLGPVKLSAEGPTTMTLVCGKDGVKVPQDNNQYCSGTTLTGCNEKSFKDILPKLTENPWQGNASSDKGATLTIKKEAFPAESKSVIIGCTGGSPEKHHCTVKLEFAGAA

SEQ ID NO: 167 - protein, 175 aa, artificial sequence
  fusion protein
SLLTEVETPIRNEWGSRSNGGGGSGGGGSGGGGSGGGGSSLLTEVETPIRNEWGSRSNGGGGSGGGGSGGGGSGGGGSSLLTEVETPTRSEWESRSSGGGGSGGGGSGGGGSGGGGSSLLTEVETPTRNEWESRSSGGGGSGGGGSGGGGSGGGGSSLLTEVETLTRNGWGCRCS

SEQ ID NO: 168 - DNA, 1440 bp, artificial sequence
  fusion gene
atgtttccgaaggcagtgagacgcgccgtcacggcaggggtgtttgccgcgcccacactgatgtcgttcttgcgatgtggcgttatggcatcggatccccctcttgttgccaatcaagttgtcacctgcccagataaaaaatcgacagccgcggtcattctcacaccgacggagaaccacttcactctcaagtgccctaaaacagcgctcacagagcctcccactcttgcgtactcacccaacaggcaaatctgcccagcgggtactacaagtagctgtacatcaaaggctgtaacattgagctccttgattcctgaagcagaagatagctggtggacgggggattctgctagtctcgacacggcaggcatcaaactcacagttccaatcgagaagttccccgtgacaacgcagacgtttgtggtcggttgcatcaagggagacgacgcacagagttgtatggtcacggtgacagtacaagccagagcctcatcggtcgtcaataatgtcgcaaggtgctcctacggtgcagacagcactcttggtcctgtcaagttgtctgcggaaggacccactacaatgaccctcgtgtgcgggaaagatggagtcaaagttcctcaagacaacaatcagtactgttccgggacgacgctgactggttgcaacgagaaatcgttcaaagatattttgccaaaattaactgagaacccgtggcagggtaacgcttcgagtgataagggtgccacgctaacgatcaagaaggaagcatttccagccgagtcaaaaagcgtcattattggatgcacagggggatcgcctgagaagcatcactgtaccgtgaaactggagtttgccggggctgcacctaggtccttgctgactgaggtcgaaacacccatccgcaacgagtggggctcgagatctaacggcggcggaggcagtggtggtggcggcagcggaggggggggctctggtggaggaggttcttcgcttcttaccgaagtcgagacaccgatccgcaacgagtggggcagtagaagtaacggaggcggaggttccggaggcggtgggagcggaggcggcggatcgggcggtggagggtccagccttctcactgaagtggagaccccaactcgcagcgaatgggaatcgcgaagttcgggcggggggggaagcggaggaggtggctccggaggaggcggaagcggaggaggcggctcgagccttctgaccgaggtggaaaccccaacgaggaatgagtgggaatcgcgctcgtccggcggcggcggttctggtggtggcggctccggaggcggcggctctggcggcgggggatcctcgcttcttaccgaggttgagactctgactcgcaacggctggggttgtcgatgttcgggtaagcctatccctaaccctctcctcggtctcgattctacgtaa

SEQ ID NO: 169 - protein, 26 aa, Toxoplasma gondii
AAGTASHVSIFAMVIGLIGSIAACVA

SEQ ID NO: 170 - DNA, 1011 bp, Toxoplasma gondii
atgtcggtttcgctgcaccacttcattatttcttctggttttttgacgagtatgtttccgaaggcagtgagacgcgccgtcacggcaggggtgtttgccgcgcccacactgatgtcgttcttgcgatgtggcgttatggcatcggatccccctcttgttgccaatcaagttgtcacctgcccagataaaaaatcgacagccgcggtcattctcacaccgacggagaaccacttcactctcaagtgccctaaaacagcgctcacagagcctcccactcttgcgtactcacccaacaggcaaatctgcccagcgggtactacaagtagctgtacatcaaaggctgtaacattgagctccttgattcctgaagcagaagatagctggtggacgggggattctgctagtctcgacacggcaggcatcaaactcacagttccaatcgagaagttccccgtgacaacgcagacgtttgtggtcggttgcatcaagggagacgacgcacagagttgtatggtcacggtgacagtacaagccagagcctcatcggtcgtcaataatgtcgcaaggtgctcctacggtgcagacagcactcttggtcctgtcaagttgtctgcggaaggacccactacaatgaccctcgtgtgcgggaaagatggagtcaaagttcctcaagacaacaatcagtactgttccgggacgacgctgactggttgcaacgagaaatcgttcaaagatattttgccaaaattaactgagaacccgtggcagggtaacgcttcgagtgataagggtgccacgctaacgatcaagaaggaagcatttccagccgagtcaaaaagcgtcattattggatgcacagggggatcgcctgagaagcatcactgtaccgtgaaactggagtttgccggggctgcagggtcagcaaaatcggctgcgggaacagccagtcacgtttccatttttgccatggtgatcggacttattggctctatcgcagcttgtgtcgcgtga

SEQ ID NO: 171 - DNA, 44 bp, artificial sequence
  primer
cttgaattccctgtttaaacgacaaaatgtttccgaaggcagtg

SEQ ID NO: 172 - DNA, 30 bp, artificial sequence
  primer
tcagcaaggacctaggtgcagccccggcaa

SEQ ID NO: 173 - DNA, 584 bp, artificial sequence
  fusion gene
cctaggtccttgctgactgaggtcgaaacacccatccgcaacgagtggggctcgagatctaacggcggcggaggcagtggtggtggcggcagcggaggggggggctctggtggaggaggttcttcgcttcttaccgaagtcgagacaccgatccgcaacgagtggggcagtagaagtaacggaggcggaggttccggaggcggtgggagcggaggcggcggatcgggcggtggagggtccagccttctcactgaagtggagaccccaactcgcagcgaatgggaatcgcgaagttcgggcggggggggaagcggaggaggtggctccggaggaggcggaagcggaggaggcggctcgagccttctgaccgaggtggaaaccccaacgaggaatgagtgggaatcgcgctcgtccggcggcggcggttctggtggtggcggctccggaggcggcggctctggcggcgggggatcctcgcttcttaccgaggttgagactctgactcgcaacggctggggttgtcgatgttcgggtaagcctatccctaaccctctcctcggtctcgattctacgtaagcggccgc

SEQ ID NO: 174 - DNA, 20 bp, artificial sequence
  primer
cctaggtccttgctgactga

SEQ ID NO: 175 - DNA, 38 bp, artificial sequence
  primer
accatggaagcggccgcttacgcgacacaagctgcgat

SEQ ID NO: 176 - DNA, 81 bp, Toxoplasma gondii
gctgcgggaacagccagtcacgtttccatttttgccatggtgatcggacttattggctctatcgcagcttgtgtcgcgtga

SEQ ID NO: 177 - DNA, 20 bp, artificial sequence
  primer
gctgcgggaacagccagtca

SEQ ID NO: 178 - DNA, 38 bp, artificial sequence; identical to SEQ ID NO: 175
  primer

SEQ ID NO: 179 - DNA, 9902 bp, artificial sequence
  plasmid
catgttctttcctgcgttatcccctgattctgtggataaccgtattaccgcctttgagtgagctgataccgctcgccgcagccgaacgaccgagcgcagcgagtcagtgagcgaggaagcggaagagcgcccaatacgcaaaccgcctctccccgcgcgttggccgattcattaatgcagctggcacgacaggtttcccgactggaaagcgggcagtgagcgcaacgcaattaatgtgagttagctcactcattaggcaccccaggctttacactttatgcttccggctcgtatgttgtgtggaattgtgagcggataacaatttcacacaggaaacagctatgaccatgattacgaattcgagctcggtacccggggatcctctagaagtatactaataacttcgtataatgtatgctatacgaagttataaactagtatcgataagcttgaacacgcgtctcagggtgcgtggttagaacacgcgtctcagggtgcgtggttagaacacgcgtctcagggtgcgtggttggaacacgcgtgtcagggtgcgtggttggaacacgcgtctcaaggtttgtggttaagcttgcctgcattgggtgcggttggtgatcctggttggaccggtggagatgcgcgcgcacgaaggggatgtgtcagaaacattttgtttgttctctgtgaacttttagatgtgttaaaggcggcgaatattagcagagagtcctccttgttggattctctcttgaatttcgccctttccttctctttgcgagtctcgtagagaacaagcactcgttcgccgtccctgacgacgcaacccgcgcagaagacatccaccaaacggtgttacacaatcaccttgtgtgaagttcttgcggaaaactactcgttggcattttttcttgaattccctgtttaaacgacaaaatgtttccgaaggcagtgagacgcgccgtcacggcaggggtgtttgccgcgcccacactgatgtcgttcttgcgatgtggcgttatggcatcggatccccctcttgttgccaatcaagttgtcacctgcccagataaaaaatcgacagccgcggtcattctcacaccgacggagaaccacttcactctcaagtgccctaaaacagcgctcacagagcctcccactcttgcgtactcacccaacaggcaaatctgcccagcgggtactacaagtagctgtacatcaaaggctgtaacattgagctccttgattcctgaagcagaagatagctggtggacgggggattctgctagtctcgacacggcaggcatcaaactcacagttccaatcgagaagttccccgtgacaacgcagacgtttgtggtcggttgcatcaagggagacgacgcacagagttgtatggtcacagtgacagtacaagccagagcctcatcggtcgtcaataatgtcgcaaggtgctcctacggtgcagacagcactcttggtcctgtcaagttgtctgcggaaggacccactacaatgaccctcgtgtgcgggaaagatggagtcaaagttcctcaagacaacaatcagtactgttccgggacgacgctgactggttgcaacgagaaatcgttcaaagatattttgccaaaattaactgagaacccgtggcagggtaacgcttcgagtgataagggtgccacgctaacgatcaagaaggaagcatttccagccgagtcaaaaagcgtcattattggatgcacagggggatcgcctgagaagcatcactgtaccgtgaaactggagtttgccggggctgcacctaggtccttgctgactgaggtcgaaacacccatccgcaacgagtggggctcgagatctaacggcggcggaggcagtggtggtggcggcagcggaggggggggctctggtggaggaggttcttcgcttcttaccgaagtcgagacaccgatccgcaacgagtggggcagtagaagtaacggaggcggaggttccggaggcggtgggagcggaggcggcggatcgggcggtggagggtccagccttctcactgaagtggagaccccaactcgcagcgaatgggaatcgcgaagttcgggcggggggggaagcggaggaggtggctccggaggaggcggaagcggaggaggcggctcgagccttctgaccgaggtggaaaccccaacgaggaatgagtgggaatcgcgctcgtccggcggcggcggttctggtggtggcggctccggaggcggcggctctggcggcgggggatcctcgcttcttaccgaggttgagactctgactcgcaacggctggggttgtcgatgttcgggtaagcctatccctaaccctctcctcggtctcgattctacggctgcgggaacagccagtcacgtttccatttttgccatggtgatcggacttattggctctatcgcagcttgtgtcgcgtaagcggccgcttccatggttttaattaatcaccgttgtgctcacttctcaaatcgacaaaggaaacacacttcgtgcagcatgtgccccattataaagaaactgagttgttccgctgtggcttgcaggtgtcacatccacaaaaaccggccgactctaaataggagtgtttcgcagcaagcagcgaaagtttatgactgggtccgaatctctgaacggatgtgtggcggacctggctgatgttgatcgccgtcgacacacgcgccacatgggtcaatacacaagacagctatcagttgttttagtcgaaccggttaacacaattcttgcccccccgaggcgcgccaacctaggagggcccgggcgccatggcagctgacgtcttatgcttctgagatatcttcaaaagatatatagctaatggcgtataagattatttaaaataaatttttagccaaactgtctcacgacgttttgaacccagtctagaatcctgcaagtgcatagaaggaaagttgtctgctgtcgtgggcagacagcaacagtccagcactctagcggcatacagaacgataacgcattcacgagtggatacacgcacatctgcgtcacccgcaactcgctttcgttctgattgacaaaaagaaaacaaggcgaggtgagactgtgtgaaatgccacatgaagagtcatcccttttcttcgataaaggacacaggggtctctggcaccccctcgtcagctctctccgacccgaggcactctccctgatccctccgaaaagagaggaaaacgagagacgggcagcttctgtatttccgttagttagcctcccccatctcccgggcaaacgtgcgcgccaggtcgcagatcgtcggtatggagcctggggtggtgacgtgggtctggaccatcccggaggtaagttgcagcagggcgtcccggcagccggcgggcgattggtcgtaatccaggataaagacatgcatgggacggaggcgtttggccaagacgtccaaagcccaggcaaacacgttatacaggtcgccgttgggggccagcaactcgggggcccgaaacagggtaaataacgtgtccccgatatggggtcgtgggcccgcgttgctctggggctcggcaccctggggcggcacggccgcccccgaaagctgtccccaatcctcccgccacgacccgccgccctgcagataccgcaccgtattggcaagcagcccataaacgcggcgaatcgcggccagcatagccaggtcaagccgctcgccggggcgctggcgtttggccaggcggtcgatgtgtctgtcctccggaagggcccccaacacgatgtttgtgccgggcaaggtcggcgggatgagggccacgaacgccagcacggcctggggggtcatgctgcccataaggtatcgcgcggccgggtagcacaggagggcggcgatgggatggcggtcgaagatgagggtgagggccgggggcggggcatgtgagctcccagcctcccccccgatatgaggagccagaacggcgtcggtcacggcataaggcatgcccattgttatctgggcgcttgtcattaccaccgccgcgtccccggccgatatctcaccctggtcgaggcggtgttgtgtggtgtagatgttcgcgattgtctcggaagcccccaacacccgccagtaagtcatcggctcgggtacgtagacgatatcgtcgcgcgaacccagggccaccagcagttgcgtggtggtggttttccccatcccgtggggaccgtctatataaacccgcagtagcgtgggcattttctgctccaggcggacttccgtggctttttgttgccggcgagggcgcaacgccgtacgtcggttgttatggccgcgagaacgcgcagcctggtcgaacgcagacgcgtgttgatggcaggggtacgaagccatgtcaagtggatcctggttagtatggacctcgacagccatctccatctggattcgtccgtgcgggacgtagcccacgacctcaaaatcctcggcggtgaaatcgtcgatttccttgatgcgttccttgttgaggatgttcacaatggggaacggtctcggttctctccgcagctgctcttttaaagcctcgacatggttcgtgtagacatgcgtgttccccatgaagtgaatgaactccttaggttttaggttgcagacgtgtgcaaccatgagcgtcaaaagcgaataggaagcgatgttgaaggggacgccgaggccgacatcgcacgaccgctgatacatgatgcacgacagctccttctggtcgttcacgtagaactggcacaacaagtgacaaggcggcagcgccatttcgtccagcgctgcaggattccaggcagtcatgagcatgcgacgatctgttggattcgttctcagcatctggatcacattcttcagctggtcgacgccctgccctgtgtagtctgtgtgcatgtctttgtatgccgcgccgaagtgtctccactggaagccgtagcccgggccgatgtctccgacctctcggtgggggagattgcgcgaatcgaggaactcgcgtgtcacattcttgtcccagatcttcacgcccttctcagaaagatggtttgcgttcgtgtcgccgcgaatgaaccacagcaactcttcgaggacccctttccagaacacacgctttgtggtgagaagtggaaaggcctgatccagcgagtagcgcatagtgcagccgaatttggagatgacaccaacgcccgttcggtcatccattgtccttccattgttaataatgtcggcaatgagatcaaggtactggaattcttcatggcctctaaagtgaacatgcggaacggcccgaatcagttccttttgctcgcgttttttccggtcttcttcgtccatccacgccaacaccggggcaatggctgcggccgaagaaggagcctgcaacccgtgcacgggagttgtctccctcgtggacgtcaaggagctcattgcgttgctcggttccgcagtggctgcgtcgtcagtcttccttctcttctcgagaaccacggagtcgtagggtaccccgttgtctgagaaggtcttggaaatgaagatgggtcgatacgtcgcttcattgtccttctctcttccgagctccggacaaaagggaacgaacacagactcggcaggagctgcagcctgcgcagcagttgatttgtttgaaagaatgtcatctccggggaacgcagggaagaaaacgtcgcacggaaactcgcgggctacacgcgtgatgtacaggtgagaggcaacgcccagagacagcgctgcctcgtacagtcccgctcctcccacgacaaaaatctggtcgacagaatccttgtactcttcctccagaaggctgagagctgctgggagtgaagcacagactcggacgcgctgctggccttcagcttgaggcttctccgccgcaatgtcttcttctttgagggaagaggaaacgacgatgttcaatctgtccacgaggggtctaaactttcgaggcatgctttcccagtttttccgtcccatgacaacggcgttgaatctcttgccgactgatggagagggaagtccagagtcgcccgtctttgcaaatttcctgggaagccacccgttcaggcgactggcttcttcgggcgtcgtttttgtcacacgacgaaagtgtttgaaatctgtggtcaagtggggccacgggaggccgttgttgatgccgatgcccctcttgggggtcatcgcgacgaccagacacaccggtttctgcatcttcccagacacgacaacgccccgtagagcagaaacgcactactaaagcgaaacttcacccgtccctgctgcactcagagcagtgctccgcactgccgtgtggtaaaatgaaaaggttctacgagacacgcgtctccggatcgacaagcgaaggatctgcacacctggtctcgatgtcgaacaaagcacggaggagagacggaaagtgcttacatcgaacacggttatcaaacccgagaaaaagaaacgaacagaagaaaaaggaaacctccgcatacttttaaagaatgaagttccccgattttcccaaaaatggcgtcattttcgcgcacggcagtcagataacaggtgtagcggctgcccaccaacagagacggcgcggccgacaggacgctactgggactgcgaacagcagcaagatcggatcttccgcgggcgggtttgaatgcaaggtttcgtgctgtcgaaaaagagaatggaacttaatgtccacgtagttcgcgcatgaaaagcgtcctaccactcaaaaaagacaaaaaccgcactcgcggcgttgaatgtgcgggggaacggatggctctcttttttggaaagcgaatgcaaaaagacaagacgcagacgcatacaacgttagtcccctggcacgagagatagaggtgctgggggccattgcggtgtcgtggatttaccagtcatggacgagatcgttccggagcctgtctttcctgaaagtctgaaaaaattgcgggaaagtcacgcatatggaacagcaccggggcgggacagagttgtctcgacaacgaatgacacacaggaactacgcggggggtgaaaatcgaatgacatgctagcgttcaacttctggaaaggtggtggcttctcgatcaggaaactccgttttctagtgttgaacaggtgcgctccgagaaatcgcacgcgggctaatacgtggtaagacaaaagaccagcctgtcgccggatttagaagtcgtggcactacatacggacctctgtacgagacatgccgatgccaagggcgttatctggtgcctgtgaccgccagtttcagacagtacgcgtctactaagtttgaaaacgcatatgaacgcgtttgtcggttaccattcattctgcaactgtctcaggcattgcgtgagcaaagcgagcgcctcgctggtagtcccaactgaatattatcgagtaagcacactactccacggacatccctagcgctcttacctgttcgtagggctagagaaatgattcggatatggttacacgtgaccacgccaaagtagaaaggaattagcataactcagtcaggcagtctccctgaggacacctgcttgatgatttgtgaggacgactcacgggatttacagcctggcgaagcttctgggttcaaaacgtcgtgagacagtttggtgagatatcttcaaaagatatatagctaatggcgtataagattatttaaaataaatttttagtcctagtcagaattgtggattatatttttaacaggttctaggcgcctgatgcggtattttctccttacgcatctgtgcggtatttcacaccgcatatggtgcactctcagtacaatctgctctgatgccgcatagttaagccagccccgacacccgccaacacccgctgacgcgccctgacgggcttgtctgctcccggcatccgcttacagacaagctgtgaccgtctccgggagctgcatgtgtcagaggttttcaccgtcatcaccgaaacgcgcgagacgaaagggcctcgtgatacgcctatttttataggttaatgtcatgataataatggtttcttagacgtcaggtggcacttttcggggaaatgtgcgcggaacccctatttgtttatttttctaaatacattcaaatatgtatccgctcatgagacaataaccctgataaatgcttcaataatattgaaaaaggaagagtatgagtattcaacatttccgtgtcgcccttattcccttttttgcggcattttgccttcctgtttttgctcacccagaaacgctggtgaaagtaaaagatgctgaagatcagttgggtgcacgagtgggttacatcgaactggatctcaacagcggtaagatccttgagagttttcgccccgaagaacgttttccaatgatgagcacttttaaagttctgctatgtggcgcggtattatcccgtattgacgccgggcaagagcaactcggtcgccgcatacactattctcagaatgacttggttgagtactcaccagtcacagaaaagcatcttacggatggcatgacagtaagagaattatgcagtgctgccataaccatgagtgataacactgcggccaacttacttctgacaacgatcggaggaccgaaggagctaaccgcttttttgcacaacatgggggatcatgtaactcgccttgatcgttgggaaccggagctgaatgaagccataccaaacgacgagcgtgacaccacgatgcctgtagcaatggcaacaacgttgcgcaaactattaactggcgaactacttactctagcttcccggcaacaattaatagactggatggaggcggataaagttgcaggaccacttctgcgctcggcccttccggctggctggtttattgctgataaatctggagccggtgagcgtgggtctcgcggtatcattgcagcactggggccagatggtaagccctcccgtatcgtagttatctacacgacggggagtcaggcaactatggatgaacgaaatagacagatcgctgagataggtgcctcactgattaagcattggtaactgtcagaccaagtttactcatatatactttagattgatttaaaacttcatttttaatttaaaaggatctaggtgaagatcctttttgataatctcatgaccaaaatcccttaacgtgagttttcgttccactgagcgtcagaccccgtagaaaagatcaaaggatcttcttgagatcctttttttctgcgcgtaatctgctgcttgcaaacaaaaaaaccaccgctaccagcggtggtttgtttgccggatcaagagctaccaactctttttccgaaggtaactggcttcagcagagcgcagataccaaatactgttcttctagtgtagccgtagttaggccaccacttcaagaactctgtagcaccgcctacatacctcgctctgctaatcctgttaccagtggctgctgccagtggcgataagtcgtgtcttaccgggttggactcaagacgatagttaccggataaggcgcagcggtcgggctgaacggggggttcgtgcacacagcccagcttggagcgaacgacctacaccgaactgagatacctacagcgtgagctttgagaaagcgccacgcttcccgaagggagaaaggcggacaggtatccggtaagcggcagggtcggaacaggagagcgcacgagggagcttccagggggaaacgcctggtatctttatagtcctgtcgggtttcgccacctctgacttgagcgtcgatttttgtgatgctcgtcaggggggcggagcctatggaaaaacgccagcaacgcggcctttttacggttcctggccttttgctggccttttgctca

SEQ ID NO: 180 - DNA, 21 bp, artificial sequence
  primer
gctggccttttgctcacatgt

SEQ ID NO: 181 - DNA, 46 bp, artificial sequence
  primer
tatagcatacattatacgaagttattagtatacttctagaggatcc

SEQ ID NO: 182 - DNA, 46 bp, artificial sequence
  primer
tataatgtatgctatacgaagttataaactagtatcgataagcttg

SEQ ID NO: 183 - DNA, 21 bp, artificial sequence
  primer
gaaacattttgtcgtttaaac

SEQ ID NO: 184 - DNA, 9902 bp, artificial sequence
  plasmid
catgttctttcctgcgttatcccctgattctgtggataaccgtattaccgcctttgagtgagctgataccgctcgccgcagccgaacgaccgagcgcagcgagtcagtgagcgaggaagcggaagagcgcccaatacgcaaaccgcctctccccgcgcgttggccgattcattaatgcagctggcacgacaggtttcccgactggaaagcgggcagtgagcgcaacgcaattaatgtgagttagctcactcattaggcaccccaggctttacactttatgcttccggctcgtatgttgtgtggaattgtgagcggataacaatttcacacaggaaacagctatgaccatgattacgaattcgagctcggtacccggggatcctctagaagtatactaataacttcgtatagtataccttatacgaagttataaactagtatcgataagcttgaacacgcgtctcagggtgcgtggttagaacacgcgtctcagggtgcgtggttagaacacgcgtctcagggtgcgtggttggaacacgcgtgtcagggtgcgtggttggaacacgcgtctcaaggtttgtggttaagcttgcctgcattgggtgcggttggtgatcctggttggaccggtggagatgcgcgcgcacgaaggggatgtgtcagaaacattttgtttgttctctgtgaacttttagatgtgttaaaggcggcgaatattagcagagagtcctccttgttggattctctcttgaatttcgccctttccttctctttgcgagtctcgtagagaacaagcactcgttcgccgtccctgacgacgcaacccgcgcagaagacatccaccaaacggtgttacacaatcaccttgtgtgaagttcttgcggaaaactactcgttggcattttttcttgaattccctgtttaaacgacaaaatgtttccgaaggcagtgagacgcgccgtcacggcaggggtgtttgccgcgcccacactgatgtcgttcttgcgatgtggcgttatggcatcggatccccctcttgttgccaatcaagttgtcacctgcccagataaaaaatcgacagccgcggtcattctcacaccgacggagaaccacttcactctcaagtgccctaaaacagcgctcacagagcctcccactcttgcgtactcacccaacaggcaaatctgcccagcgggtactacaagtagctgtacatcaaaggctgtaacattgagctccttgattcctgaagcagaagatagctggtggacgggggattctgctagtctcgacacggcaggcatcaaactcacagttccaatcgagaagttccccgtgacaacgcagacgtttgtggtcggttgcatcaagggagacgacgcacagagttgtatggtcacagtgacagtacaagccagagcctcatcggtcgtcaataatgtcgcaaggtgctcctacggtgcagacagcactcttggtcctgtcaagttgtctgcggaaggacccactacaatgaccctcgtgtgcgggaaagatggagtcaaagttcctcaagacaacaatcagtactgttccgggacgacgctgactggttgcaacgagaaatcgttcaaagatattttgccaaaattaactgagaacccgtggcagggtaacgcttcgagtgataagggtgccacgctaacgatcaagaaggaagcatttccagccgagtcaaaaagcgtcattattggatgcacagggggatcgcctgagaagcatcactgtaccgtgaaactggagtttgccggggctgcacctaggtccttgctgactgaggtcgaaacacccatccgcaacgagtggggctcgagatctaacggcggcggaggcagtggtggtggcggcagcggaggggggggctctggtggaggaggttcttcgcttcttaccgaagtcgagacaccgatccgcaacgagtggggcagtagaagtaacggaggcggaggttccggaggcggtgggagcggaggcggcggatcgggcggtggagggtccagccttctcactgaagtggagaccccaactcgcagcgaatgggaatcgcgaagttcgggcggggggggaagcggaggaggtggctccggaggaggcggaagcggaggaggcggctcgagccttctgaccgaggtggaaaccccaacgaggaatgagtgggaatcgcgctcgtccggcggcggcggttctggtggtggcggctccggaggcggcggctctggcggcgggggatcctcgcttcttaccgaggttgagactctgactcgcaacggctggggttgtcgatgttcgggtaagcctatccctaaccctctcctcggtctcgattctacggctgcgggaacagccagtcacgtttccatttttgccatggtgatcggacttattggctctatcgcagcttgtgtcgcgtaagcggccgcttccatggttttaattaatcaccgttgtgctcacttctcaaatcgacaaaggaaacacacttcgtgcagcatgtgccccattataaagaaactgagttgttccgctgtggcttgcaggtgtcacatccacaaaaaccggccgactctaaataggagtgtttcgcagcaagcagcgaaagtttatgactgggtccgaatctctgaacggatgtgtggcggacctggctgatgttgatcgccgtcgacacacgcgccacatgggtcaatacacaagacagctatcagttgttttagtcgaaccggttaacacaattcttgcccccccgaggcgcgccaacctaggagggcccgggcgccatggcagctgacgtcttatgcttctgagatatcttcaaaagatatatagctaatggcgtataagattatttaaaataaatttttagccaaactgtctcacgacgttttgaacccagtctagaatcctgcaagtgcatagaaggaaagttgtctgctgtcgtgggcagacagcaacagtccagcactctagcggcatacagaacgataacgcattcacgagtggatacacgcacatctgcgtcacccgcaactcgctttcgttctgattgacaaaaagaaaacaaggcgaggtgagactgtgtgaaatgccacatgaagagtcatcccttttcttcgataaaggacacaggggtctctggcaccccctcgtcagctctctccgacccgaggcactctccctgatccctccgaaaagagaggaaaacgagagacgggcagcttctgtatttccgttagttagcctcccccatctcccgggcaaacgtgcgcgccaggtcgcagatcgtcggtatggagcctggggtggtgacgtgggtctggaccatcccggaggtaagttgcagcagggcgtcccggcagccggcgggcgattggtcgtaatccaggataaagacatgcatgggacggaggcgtttggccaagacgtccaaagcccaggcaaacacgttatacaggtcgccgttgggggccagcaactcgggggcccgaaacagggtaaataacgtgtccccgatatggggtcgtgggcccgcgttgctctggggctcggcaccctggggcggcacggccgcccccgaaagctgtccccaatcctcccgccacgacccgccgccctgcagataccgcaccgtattggcaagcagcccataaacgcggcgaatcgcggccagcatagccaggtcaagccgctcgccggggcgctggcgtttggccaggcggtcgatgtgtctgtcctccggaagggcccccaacacgatgtttgtgccgggcaaggtcggcgggatgagggccacgaacgccagcacggcctggggggtcatgctgcccataaggtatcgcgcggccgggtagcacaggagggcggcgatgggatggcggtcgaagatgagggtgagggccgggggcggggcatgtgagctcccagcctcccccccgatatgaggagccagaacggcgtcggtcacggcataaggcatgcccattgttatctgggcgcttgtcattaccaccgccgcgtccccggccgatatctcaccctggtcgaggcggtgttgtgtggtgtagatgttcgcgattgtctcggaagcccccaacacccgccagtaagtcatcggctcgggtacgtagacgatatcgtcgcgcgaacccagggccaccagcagttgcgtggtggtggttttccccatcccgtggggaccgtctatataaacccgcagtagcgtgggcattttctgctccaggcggacttccgtggctttttgttgccggcgagggcgcaacgccgtacgtcggttgttatggccgcgagaacgcgcagcctggtcgaacgcagacgcgtgttgatggcaggggtacgaagccatgtcaagtggatcctggttagtatggacctcgacagccatctccatctggattcgtccgtgcgggacgtagcccacgacctcaaaatcctcggcggtgaaatcgtcgatttccttgatgcgttccttgttgaggatgttcacaatggggaacggtctcggttctctccgcagctgctcttttaaagcctcgacatggttcgtgtagacatgcgtgttccccatgaagtgaatgaactccttaggttttaggttgcagacgtgtgcaaccatgagcgtcaaaagcgaataggaagcgatgttgaaggggacgccgaggccgacatcgcacgaccgctgatacatgatgcacgacagctccttctggtcgttcacgtagaactggcacaacaagtgacaaggcggcagcgccatttcgtccagcgctgcaggattccaggcagtcatgagcatgcgacgatctgttggattcgttctcagcatctggatcacattcttcagctggtcgacgccctgccctgtgtagtctgtgtgcatgtctttgtatgccgcgccgaagtgtctccactggaagccgtagcccgggccgatgtctccgacctctcggtgggggagattgcgcgaatcgaggaactcgcgtgtcacattcttgtcccagatcttcacgcccttctcagaaagatggtttgcgttcgtgtcgccgcgaatgaaccacagcaactcttcgaggacccctttccagaacacacgctttgtggtgagaagtggaaaggcctgatccagcgagtagcgcatagtgcagccgaatttggagatgacaccaacgcccgttcggtcatccattgtccttccattgttaataatgtcggcaatgagatcaaggtactggaattcttcatggcctctaaagtgaacatgcggaacggcccgaatcagttccttttgctcgcgttttttccggtcttcttcgtccatccacgccaacaccggggcaatggctgcggccgaagaaggagcctgcaacccgtgcacgggagttgtctccctcgtggacgtcaaggagctcattgcgttgctcggttccgcagtggctgcgtcgtcagtcttccttctcttctcgagaaccacggagtcgtagggtaccccgttgtctgagaaggtcttggaaatgaagatgggtcgatacgtcgcttcattgtccttctctcttccgagctccggacaaaagggaacgaacacagactcggcaggagctgcagcctgcgcagcagttgatttgtttgaaagaatgtcatctccggggaacgcagggaagaaaacgtcgcacggaaactcgcgggctacacgcgtgatgtacaggtgagaggcaacgcccagagacagcgctgcctcgtacagtcccgctcctcccacgacaaaaatctggtcgacagaatccttgtactcttcctccagaaggctgagagctgctgggagtgaagcacagactcggacgcgctgctggccttcagcttgaggcttctccgccgcaatgtcttcttctttgagggaagaggaaacgacgatgttcaatctgtccacgaggggtctaaactttcgaggcatgctttcccagtttttccgtcccatgacaacggcgttgaatctcttgccgactgatggagagggaagtccagagtcgcccgtctttgcaaatttcctgggaagccacccgttcaggcgactggcttcttcgggcgtcgtttttgtcacacgacgaaagtgtttgaaatctgtggtcaagtggggccacgggaggccgttgttgatgccgatgcccctcttgggggtcatcgcgacgaccagacacaccggtttctgcatcttcccagacacgacaacgccccgtagagcagaaacgcactactaaagcgaaacttcacccgtccctgctgcactcagagcagtgctccgcactgccgtgtggtaaaatgaaaaggttctacgagacacgcgtctccggatcgacaagcgaaggatctgcacacctggtctcgatgtcgaacaaagcacggaggagagacggaaagtgcttacatcgaacacggttatcaaacccgagaaaaagaaacgaacagaagaaaaaggaaacctccgcatacttttaaagaatgaagttccccgattttcccaaaaatggcgtcattttcgcgcacggcagtcagataacaggtgtagcggctgcccaccaacagagacggcgcggccgacaggacgctactgggactgcgaacagcagcaagatcggatcttccgcgggcgggtttgaatgcaaggtttcgtgctgtcgaaaaagagaatggaacttaatgtccacgtagttcgcgcatgaaaagcgtcctaccactcaaaaaagacaaaaaccgcactcgcggcgttgaatgtgcgggggaacggatggctctcttttttggaaagcgaatgcaaaaagacaagacgcagacgcatacaacgttagtcccctggcacgagagatagaggtgctgggggccattgcggtgtcgtggatttaccagtcatggacgagatcgttccggagcctgtctttcctgaaagtctgaaaaaattgcgggaaagtcacgcatatggaacagcaccggggcgggacagagttgtctcgacaacgaatgacacacaggaactacgcggggggtgaaaatcgaatgacatgctagcgttcaacttctggaaaggtggtggcttctcgatcaggaaactccgttttctagtgttgaacaggtgcgctccgagaaatcgcacgcgggctaatacgtggtaagacaaaagaccagcctgtcgccggatttagaagtcgtggcactacatacggacctctgtacgagacatgccgatgccaagggcgttatctggtgcctgtgaccgccagtttcagacagtacgcgtctactaagtttgaaaacgcatatgaacgcgtttgtcggttaccattcattctgcaactgtctcaggcattgcgtgagcaaagcgagcgcctcgctggtagtcccaactgaatattatcgagtaagcacactactccacggacatccctagcgctcttacctgttcgtagggctagagaaatgattcggatatggttacacgtgaccacgccaaagtagaaaggaattagcataactcagtcaggcagtctccctgaggacacctgcttgatgatttgtgaggacgactcacgggatttacagcctggcgaagcttctgggttcaaaacgtcgtgagacagtttggtgagatatcttcaaaagatatatagctaatggcgtataagattatttaaaataaatttttagtcctagtcagaattgtggattatatttttaacaggttctaggcgcctgatgcggtattttctccttacgcatctgtgcggtatttcacaccgcatatggtgcactctcagtacaatctgctctgatgccgcatagttaagccagccccgacacccgccaacacccgctgacgcgccctgacgggcttgtctgctcccggcatccgcttacagacaagctgtgaccgtctccgggagctgcatgtgtcagaggttttcaccgtcatcaccgaaacgcgcgagacgaaagggcctcgtgatacgcctatttttataggttaatgtcatgataataatggtttcttagacgtcaggtggcacttttcggggaaatgtgcgcggaacccctatttgtttatttttctaaatacattcaaatatgtatccgctcatgagacaataaccctgataaatgcttcaataatattgaaaaaggaagagtatgagtattcaacatttccgtgtcgcccttattcccttttttgcggcattttgccttcctgtttttgctcacccagaaacgctggtgaaagtaaaagatgctgaagatcagttgggtgcacgagtgggttacatcgaactggatctcaacagcggtaagatccttgagagttttcgccccgaagaacgttttccaatgatgagcacttttaaagttctgctatgtggcgcggtattatcccgtattgacgccgggcaagagcaactcggtcgccgcatacactattctcagaatgacttggttgagtactcaccagtcacagaaaagcatcttacggatggcatgacagtaagagaattatgcagtgctgccataaccatgagtgataacactgcggccaacttacttctgacaacgatcggaggaccgaaggagctaaccgcttttttgcacaacatgggggatcatgtaactcgccttgatcgttgggaaccggagctgaatgaagccataccaaacgacgagcgtgacaccacgatgcctgtagcaatggcaacaacgttgcgcaaactattaactggcgaactacttactctagcttcccggcaacaattaatagactggatggaggcggataaagttgcaggaccacttctgcgctcggcccttccggctggctggtttattgctgataaatctggagccggtgagcgtgggtctcgcggtatcattgcagcactggggccagatggtaagccctcccgtatcgtagttatctacacgacggggagtcaggcaactatggatgaacgaaatagacagatcgctgagataggtgcctcactgattaagcattggtaactgtcagaccaagtttactcatatatactttagattgatttaaaacttcatttttaatttaaaaggatctaggtgaagatcctttttgataatctcatgaccaaaatcccttaacgtgagttttcgttccactgagcgtcagaccccgtagaaaagatcaaaggatcttcttgagatcctttttttctgcgcgtaatctgctgcttgcaaacaaaaaaaccaccgctaccagcggtggtttgtttgccggatcaagagctaccaactctttttccgaaggtaactggcttcagcagagcgcagataccaaatactgttcttctagtgtagccgtagttaggccaccacttcaagaactctgtagcaccgcctacatacctcgctctgctaatcctgttaccagtggctgctgccagtggcgataagtcgtgtcttaccgggttggactcaagacgatagttaccggataaggcgcagcggtcgggctgaacggggggttcgtgcacacagcccagcttggagcgaacgacctacaccgaactgagatacctacagcgtgagctttgagaaagcgccacgcttcccgaagggagaaaggcggacaggtatccggtaagcggcagggtcggaacaggagagcgcacgagggagcttccagggggaaacgcctggtatctttatagtcctgtcgggtttcgccacctctgacttgagcgtcgatttttgtgatgctcgtcaggggggcggagcctatggaaaaacgccagcaacgcggcctttttacggttcctggccttttgctggccttttgctca

SEQ ID NO: 185 - DNA, 46 bp, artificial sequence
  primer
tataaggtatactatacgaagttattagtatacttctagaggatcc

SEQ ID NO: 186 - DNA, 46 bp, artificial sequence
  primer
tatagtataccttatacgaagttataaactagtatcgataagcttg

SEQ ID NO: 187 - DNA, 20 bp, artificial sequence
  primer
aacccgcgcagaagacatcc

SEQ ID NO: 188 - DNA, 21 bp, artificial sequence
  primer
atggggcacatgctgcacgaa

SEQ ID NO: 189 - DNA, 20 bp, artificial sequence
  primer
agaggttgacaccgacaaag

SEQ ID NO: 190 - DNA, 20 bp, artificial sequence
  primer
cccgtctagcaagacctcaa

SEQ ID NO: 191 - DNA, 1501 bp, artificial sequence
  PCR product
gaggtccatactaaccaggatccacttgacatggcttcgtacccctgccatcaacacgcgtctgcgttcgaccaggctgcgcgttctcgcggccataacaaccgacgtacggcgttgcgccctcgccggcaacaaaaagccacggaagtccgcctggagcagaaaatgcccacgctactgcgggtttatatagacggtccccacgggatggggaaaaccaccaccacgcaactgctggtggccctgggttcgcgcgacgatatcgtctacgtacccgagccgatgacttactggcgggtgttgggggcttccgagacaatcgcgaacatctacaccacacaacaccgcctcgaccagggtgagatatcggccggggacgcggcggtggtaatgacaagcgcccagataacaatgggcatgccttatgccgtgaccgacgccgttctggctcctcatatcgggggggaggctgggagctcacatgccccgcccccggccctcaccctcatcttcgaccgccatcccatcgccgccctcctgtgctacccggccgcgcgataccttatgggcagcatgaccccccaggccgtgctggcgttcgtggccctcatcccgccgaccttgcccggcacaaacatcgtgttgggggcccttccggaggacagacacatcgaccgcctggccaaacgccagcgccccggcgagcggcttgacctggctatgctggccgcgattcgccgcgtttatgggctgcttgccaatacggtgcggtatctgcagggcggcgggtcgtggcgggaggattggggacagctttcgggggcggccgtgccgccccagggtgccgagccccagagcaacgcgggcccacgaccccatatcggggacacgttatttaccctgtttcgggcccccgagttgctggcccccaacggcgacctgtataacgtgtttgcctgggctttggacgtcttggccaaacgcctccgtcccatgcatgtctttatcctggattacgaccaatcgcccgccggctgccgggacgccctgctgcaacttacctccgggatggtccagacccacgtcaccaccccaggctccataccgacgatctgcgacctggcgcgcacgtttgcccgggagatgggggaggctaactaacggaaatacagaagctgcccgtctctcgttttcctctcttttcggagggatcagggagagtgcctcgggtcggagagagctgacgagggggtgccagagacccctgtgtcctttatcgaagaaaagggatgactcttcatgtggcatttcacacagtctcacctcgccttgttttctttttgtcaatcagaacgaaagcgagttgcgggtgacgcagatgtgcgtgtatccactcgtgaatgcgttatcgttctgtatgccgctagagtgctggactgttgctgtctgcccacgacagcagacaactttccttctatgcacttgcaggattctagaaaaa

SEQ ID NO: 192 - DNA, 914 bp, artificial sequence
  PCR product
aaaggtacctctagaagtatactattcgaaaaactagtatcgataagcttgaacacgcgtctcagggtgcgtggttagaacacgcgtctcagggtgcgtggttagaacacgcgtctcagggtgcgtggttggaacacgcgtgtcagggtgcgtggttggaacacgcgtctcaaggtttgtggttaagcttgcctgcattgggtgcggttggtgatcctggttggaccggtggagatgcgcgcgcacgaaggggatgtgtcagaaacattttgtttgttctctgtgaacttttagatgtgttaaaggcggcgaatattagcagagagtcctccttgttggattctctcttgaatttcgccctttccttctctttgcgagtctcgtagagaacaagcactcgttcgccgtccctgacgacgcaacccgcgcagaagacatccaccaaacggtgttacacaatcaccttgtgtgaagttcttgcggaaaactactcgttggcattttttcttgaattccctgtttaaacaaaattcttaagttgcggccgcttccatggttttaattaatcaccgttgtgctcacttctcaaatcgacaaaggaaacacacttcgtgcagcatgtgccccattataaagaaactgagttgttccgctgtggcttgcaggtgtcacatccacaaaaaccggccgactctaaataggagtgtttcgcagcaagcagcgaaagtttatgactgggtccgaatctctgaacggatgtgtggcggacctggctgatgttgatcgccgtcgacacacgcgccacatgggtcaatacacaagacagctatcagttgttttagtcgaaccggttaacacaattcttgcccccccgaggcgcgccaacctaggatttaaattctagagagctcaaa

SEQ ID NO: 193 - DNA, 142 bp, artificial sequence
  PCR product
aataccgcatcaggcgcctagaacctgttaaaaatataatccacaattctgactaggactaaaaatttattttaaataatcttatacgccattagctatatatcttttgaagatatctcaccaaactgtctcacgacgtttt

SEQ ID NO: 194 - DNA, 153 bp, artificial sequence
  PCR product
gtctcacgacgttttgaacccagaagcttcgccaggctgtaaatcccgtgagtcgtcctcacaaatcatcaagcaggtgtcctcagggagactgcctgactgagttatgctaattcctttctactttggcgtggtcacgtgtaaccatatccg

SEQ ID NO: 195 - DNA, 546 bp, artificial sequence
  PCR product
cgcctccgtcccatgcatgtctttatcctggattacgaccaatcgcccgccggctgccgggacgccctgctgcaacttacctccgggatggtccagacccacgtcaccaccccaggctccataccgacgatctgcgacctggcgcgcacgtttgcccgggagatgggggaggctaactaacggaaatacagaagctgcccgtctctcgttttcctctcttttcggagggatcagggagagtgcctcgggtcggagagagctgacgagggggtgccagagacccctgtgtcctttatcgaagaaaagggatgactcttcatgtggcatttcacacagtctcacctcgccttgttttctttttgtcaatcagaacgaaagcgagttgcgggtgacgcagatgtgcgtgtatccactcgtgaatgcgttatcgttctgtatgccgctagagtgctggactgttgctgtctgcccacgacagcagacaactttccttctatgcacttgcaggattctagactgggttcaaaacgtcgtgagacagtttgg

SEQ ID NO: 196 - DNA, 133 bp, artificial sequence
  PCR product
cgtgagacagtttggctaaaaatttattttaaataatcttatacgccattagctatatatcttttgaagatatctcagaagcataagacgtcagctgccatggcgcccgggccctcctaggttggcgcgcctc

SEQ ID NO: 197 - DNA, 906 bp, artificial sequence
  PCR product
cttgaattccctgtttaaacgacaaaatgtttccgaaggcagtgagacgcgccgtcacggcaggggtgtttgccgcgcccacactgatgtcgttcttgcgatgtggcgttatggcatcggatccccctcttgttgccaatcaagttgtcacctgcccagataaaaaatcgacagccgcggtcattctcacaccgacggagaaccacttcactctcaagtgccctaaaacagcgctcacagagcctcccactcttgcgtactcacccaacaggcaaatctgcccagcgggtactacaagtagctgtacatcaaaggctgtaacattgagctccttgattcctgaagcagaagatagctggtggacgggggattctgctagtctcgacacggcaggcatcaaactcacagttccaatcgagaagttccccgtgacaacgcagacgtttgtggtcggttgcatcaagggagacgacgcacagagttgtatggtcacggtgacagtacaagccagagcctcatcggtcgtcaataatgtcgcaaggtgctcctacggtgcagacagcactcttggtcctgtcaagttgtctgcggaaggacccactacaatgaccctcgtgtgcgggaaagatggagtcaaagttcctcaagacaacaatcagtactgttccgggacgacgctgactggttgcaacgagaaatcgttcaaagatattttgccaaaattaactgagaacccgtggcagggtaacgcttcgagtgataagggtgccacgctaacgatcaagaaggaagcatttccagccgagtcaaaaagcgtcattattggatgcacagggggatcgcctgagaagcatcactgtaccgtgaaactggagtttgccggggctgcacctaggtccttgctga

SEQ ID NO: 198 - DNA, 588 bp, artificial sequence
  PCR product
cctaggtccttgctgactgaggtcgaaacacccatccgcaacgagtggggctcgagatctaacggcggcggaggcagtggtggtggcggcagcggaggggggggctctggtggaggaggttcttcgcttcttaccgaagtcgagacaccgatccgcaacgagtggggcagtagaagtaacggaggcggaggttccggaggcggtgggagcggaggcggcggatcgggcggtggagggtccagccttctcactgaagtggagaccccaactcgcagcgaatgggaatcgcgaagttcgggcggggggggaagcggaggaggtggctccggaggaggcggaagcggaggaggcggctcgagccttctgaccgaggtggaaaccccaacgaggaatgagtgggaatcgcgctcgtccggcggcggcggttctggtggtggcggctccggaggcggcggctctggcggcgggggatcctcgcttcttaccgaggttgagactctgactcgcaacggctggggttgtcgatgttcgggtaagcctatccctaaccctctcctcggtctcgattctacggctgcgggaacagcc

SEQ ID NO: 199 - DNA, 98 bp, artificial sequence
  PCR product
gctgcgggaacagccagtcacgtttccatttttgccatggtgatcggacttattggctctatcgcagcttgtgtcgcgtaagcggccgcttccatggt

SEQ ID NO: 200 - DNA, 438 bp, artificial sequence
  PCR product
gctggccttttgctcacatgttctttcctgcgttatcccctgattctgtggataaccgtattaccgcctttgagtgagctgataccgctcgccgcagccgaacgaccgagcgcagcgagtcagtgagcgaggaagcggaagagcgcccaatacgcaaaccgcctctccccgcgcgttggccgattcattaatgcagctggcacgacaggtttcccgactggaaagcgggcagtgagcgcaacgcaattaatgtgagttagctcactcattaggcaccccaggctttacactttatgcttccggctcgtatgttgtgtggaattgtgagcggataacaatttcacacaggaaacagctatgaccatgattacgaattcgagctcggtacccggggatcctctagaagtatactaataacttcgtataatgtatgctata

SEQ ID NO: 201 - DNA, 534 bp, artificial sequence
  PCR product
tataatgtatgctatacgaagttataaactagtatcgataagcttgaacacgcgtctcagggtgcgtggttagaacacgcgtctcagggtgcgtggttagaacacgcgtctcagggtgcgtggttggaacacgcgtgtcagggtgcgtggttggaacacgcgtctcaaggtttgtggttaagcttgcctgcattgggtgcggttggtgatcctggttggaccggtggagatgcgcgcgcacgaaggggatgtgtcagaaacattttgtttgttctctgtgaacttttagatgtgttaaaggcggcgaatattagcagagagtcctccttgttggattctctcttgaatttcgccctttccttctctttgcgagtctcgtagagaacaagcactcgttcgccgtccctgacgacgcaacccgcgcagaagacatccaccaaacggtgttacacaatcaccttgtgtgaagttcttgcggaaaactactcgttggcattttttcttgaattccctgtttaaacgacaaaatgtttc

SEQ ID NO: 202 - DNA, 438 bp, artificial sequence
  PCR product
gctggccttttgctcacatgttctttcctgcgttatcccctgattctgtggataaccgtattaccgcctttgagtgagctgataccgctcgccgcagccgaacgaccgagcgcagcgagtcagtgagcgaggaagcggaagagcgcccaatacgcaaaccgcctctccccgcgcgttggccgattcattaatgcagctggcacgacaggtttcccgactggaaagcgggcagtgagcgcaacgcaattaatgtgagttagctcactcattaggcaccccaggctttacactttatgcttccggctcgtatgttgtgtggaattgtgagcggataacaatttcacacaggaaacagctatgaccatgattacgaattcgagctcggtacccggggatcctctagaagtatactaataacttcgtatagtataccttata

SEQ ID NO: 203 - DNA, 534 bp, artificial sequence
  PCR product
tatagtataccttatacgaagttataaactagtatcgataagcttgaacacgcgtctcagggtgcgtggttagaacacgcgtctcagggtgcgtggttagaacacgcgtctcagggtgcgtggttggaacacgcgtgtcagggtgcgtggttggaacacgcgtctcaaggtttgtggttaagcttgcctgcattgggtgcggttggtgatcctggttggaccggtggagatgcgcgcgcacgaaggggatgtgtcagaaacattttgtttgttctctgtgaacttttagatgtgttaaaggcggcgaatattagcagagagtcctccttgttggattctctcttgaatttcgccctttccttctctttgcgagtctcgtagagaacaagcactcgttcgccgtccctgacgacgcaacccgcgcagaagacatccaccaaacggtgttacacaatcaccttgtgtgaagttcttgcggaaaactactcgttggcattttttcttgaattccctgtttaaacgacaaaatgtttc

SEQ ID NO: 204 - DNA, 1719 bp, artificial sequence
  PCR product
aacccgcgcagaagacatccaccaaacggtgttacacaatcaccttgtgtgaagttcttgcggaaaactactcgttggcattttttcttgaattccctgtttaaacgacaaaatgtttccgaaggcagtgagacgcgccgtcacggcaggggtgtttgccgcgcccacactgatgtcgttcttgcgatgtggcgttatggcatcggatccccctcttgttgccaatcaagttgtcacctgcccagataaaaaatcgacagccgcggtcattctcacaccgacggagaaccacttcactctcaagtgccctaaaacagcgctcacagagcctcccactcttgcgtactcacccaacaggcaaatctgcccagcgggtactacaagtagctgtacatcaaaggctgtaacattgagctccttgattcctgaagcagaagatagctggtggacgggggattctgctagtctcgacacggcaggcatcaaactcacagttccaatcgagaagttccccgtgacaacgcagacgtttgtggtcggttgcatcaagggagacgacgcacagagttgtatggtcacagtgacagtacaagccagagcctcatcggtcgtcaataatgtcgcaaggtgctcctacggtgcagacagcactcttggtcctgtcaagttgtctgcggaaggacccactacaatgaccctcgtgtgcgggaaagatggagtcaaagttcctcaagacaacaatcagtactgttccgggacgacgctgactggttgcaacgagaaatcgttcaaagatattttgccaaaattaactgagaacccgtggcagggtaacgcttcgagtgataagggtgccacgctaacgatcaagaaggaagcatttccagccgagtcaaaaagcgtcattattggatgcacagggggatcgcctgagaagcatcactgtaccgtgaaactggagtttgccggggctgcacctaggtccttgctgactgaggtcgaaacacccatccgcaacgagtggggctcgagatctaacggcggcggaggcagtggtggtggcggcagcggaggggggggctctggtggaggaggttcttcgcttcttaccgaagtcgagacaccgatccgcaacgagtggggcagtagaagtaacggaggcggaggttccggaggcggtgggagcggaggcggcggatcgggcggtggagggtccagccttctcactgaagtggagaccccaactcgcagcgaatgggaatcgcgaagttcgggcggggggggaagcggaggaggtggctccggaggaggcggaagcggaggaggcggctcgagccttctgaccgaggtggaaaccccaacgaggaatgagtgggaatcgcgctcgtccggcggcggcggttctggtggtggcggctccggaggcggcggctctggcggcgggggatcctcgcttcttaccgaggttgagactctgactcgcaacggctggggttgtcgatgttcgggtaagcctatccctaaccctctcctcggtctcgattctacggctgcgggaacagccagtcacgtttccatttttgccatggtgatcggacttattggctctatcgcagcttgtgtcgcgtaagcggccgcttccatggttttaattaatcaccgttgtgctcacttctcaaatcgacaaaggaaacacacttcgtgcagcatgtgccccat

SEQ ID NO: 205 - DNA, 2704 bp, artificial sequence
  PCR product
agaggttgacaccgacaaagcaggttctcatagaatgaagaggccgcacctcctagtggcagaagcgttcttttcgtaggcacttcggcagagatgtctcacgtttgatgggttcttatttcatacatggttgggcggtttaggctttcagactcgagaaccatcagaattcaaactttgcacgcggcaaaacgcgggggtaaccatgtcgtgtgtcggtggtaattagtgaggcagtcttgctttagttggcagtgtgtcctcatgttttccctcgctgtctgcgtaaaggcacacaatctactttgttttacctgaactcggttcacaaacctaacgttctcggtacaaacccatctgtgtatccgcgtgtgagccgatcgcttcgttgcagaacttctttctaggccaaggccactattgccagcggcacaaatcgaaatattctcaatccttggcttagtgtggagactttttacttcgtgttactattgtttctcgagtcaaactctgcatcttgtctttgcgctgatctccgctctcagagactcgctgaagcttataacttcgtataatgtatgctatacgaagttataaactagtatcgataagcttgaacacgcgtctcagggtgcgtggttagaacacgcgtctcagggtgcgtggttagaacacgcgtctcagggtgcgtggttggaacacgcgtgtcagggtgcgtggttggaacacgcgtctcaaggtttgtggttaagcttgcctgcattgggtgcggttggtgatcctggttggaccggtggagatgcgcgcgcacgaaggggatgtgtcagaaacattttgtttgttctctgtgaacttttagatgtgttaaaggcggcgaatattagcagagagtcctccttgttggattctctcttgaatttcgccctttccttctctttgcgagtctcgtagagaacaagcactcgttcgccgtccctgacgacgcaacccgcgcagaagacatccaccaaacggtgttacacaatcaccttgtgtgaagttcttgcggaaaactactcgttggcattttttcttgaattccctgtttaaacgacaaaatgtttccgaaggcagtgagacgcgccgtcacggcaggggtgtttgccgcgcccacactgatgtcgttcttgcgatgtggcgttatggcatcggatccccctcttgttgccaatcaagttgtcacctgcccagataaaaaatcgacagccgcggtcattctcacaccgacggagaaccacttcactctcaagtgccctaaaacagcgctcacagagcctcccactcttgcgtactcacccaacaggcaaatctgcccagcgggtactacaagtagctgtacatcaaaggctgtaacattgagctccttgattcctgaagcagaagatagctggtggacgggggattctgctagtctcgacacggcaggcatcaaactcacagttccaatcgagaagttccccgtgacaacgcagacgtttgtggtcggttgcatcaagggagacgacgcacagagttgtatggtcacagtgacagtacaagccagagcctcatcggtcgtcaataatgtcgcaaggtgctcctacggtgcagacagcactcttggtcctgtcaagttgtctgcggaaggacccactacaatgaccctcgtgtgcgggaaagatggagtcaaagttcctcaagacaacaatcagtactgttccgggacgacgctgactggttgcaacgagaaatcgttcaaagatattttgccaaaattaactgagaacccgtggcagggtaacgcttcgagtgataagggtgccacgctaacgatcaagaaggaagcatttccagccgagtcaaaaagcgtcattattggatgcacagggggatcgcctgagaagcatcactgtaccgtgaaactggagtttgccggggctgcacctaggtccttgctgactgaggtcgaaacacccatccgcaacgagtggggctcgagatctaacggcggcggaggcagtggtggtggcggcagcggaggggggggctctggtggaggaggttcttcgcttcttaccgaagtcgagacaccgatccgcaacgagtggggcagtagaagtaacggaggcggaggttccggaggcggtgggagcggaggcggcggatcgggcggtggagggtccagccttctcactgaagtggagaccccaactcgcagcgaatgggaatcgcgaagttcgggcggggggggaagcggaggaggtggctccggaggaggcggaagcggaggaggcggctcgagccttctgaccgaggtggaaaccccaacgaggaatgagtgggaatcgcgctcgtccggcggcggcggttctggtggtggcggctccggaggcggcggctctggcggcgggggatcctcgcttcttaccgaggttgagactctgactcgcaacggctggggttgtcgatgttcgggtaagcctatccctaaccctctcctcggtctcgattctacggctgcgggaacagccagtcacgtttccatttttgccatggtgatcggacttattggctctatcgcagcttgtgtcgcgtaagcggccgcttccatggttttaattaatcaccgttgtgctcacttctcaaatcgacaaaggaaacacacttcgtgcagcatgtgccccat

SEQ ID NO: 206 - DNA, 2366 bp, artificial sequence
  PCR product
cccgtctagcaagacctcaaatgcgctaaaaaagctcaacaagggtagccatgtacaaactctgcagttatttattgccttctaccagaagtcccatgttgcagatctctccaaaaatgtgatcgcggcatctcgtatcaaataacttttacatagagatgttgttgtaccaccaagcttgagcttgacccggctatagaatttacctgcatcgatgaagcttataacttcgtatagtataccttatacgaagttataaactagtatcgataagcttgaacacgcgtctcagggtgcgtggttagaacacgcgtctcagggtgcgtggttagaacacgcgtctcagggtgcgtggttggaacacgcgtgtcagggtgcgtggttggaacacgcgtctcaaggtttgtggttaagcttgcctgcattgggtgcggttggtgatcctggttggaccggtggagatgcgcgcgcacgaaggggatgtgtcagaaacattttgtttgttctctgtgaacttttagatgtgttaaaggcggcgaatattagcagagagtcctccttgttggattctctcttgaatttcgccctttccttctctttgcgagtctcgtagagaacaagcactcgttcgccgtccctgacgacgcaacccgcgcagaagacatccaccaaacggtgttacacaatcaccttgtgtgaagttcttgcggaaaactactcgttggcattttttcttgaattccctgtttaaacgacaaaatgtttccgaaggcagtgagacgcgccgtcacggcaggggtgtttgccgcgcccacactgatgtcgttcttgcgatgtggcgttatggcatcggatccccctcttgttgccaatcaagttgtcacctgcccagataaaaaatcgacagccgcggtcattctcacaccgacggagaaccacttcactctcaagtgccctaaaacagcgctcacagagcctcccactcttgcgtactcacccaacaggcaaatctgcccagcgggtactacaagtagctgtacatcaaaggctgtaacattgagctccttgattcctgaagcagaagatagctggtggacgggggattctgctagtctcgacacggcaggcatcaaactcacagttccaatcgagaagttccccgtgacaacgcagacgtttgtggtcggttgcatcaagggagacgacgcacagagttgtatggtcacagtgacagtacaagccagagcctcatcggtcgtcaataatgtcgcaaggtgctcctacggtgcagacagcactcttggtcctgtcaagttgtctgcggaaggacccactacaatgaccctcgtgtgcgggaaagatggagtcaaagttcctcaagacaacaatcagtactgttccgggacgacgctgactggttgcaacgagaaatcgttcaaagatattttgccaaaattaactgagaacccgtggcagggtaacgcttcgagtgataagggtgccacgctaacgatcaagaaggaagcatttccagccgagtcaaaaagcgtcattattggatgcacagggggatcgcctgagaagcatcactgtaccgtgaaactggagtttgccggggctgcacctaggtccttgctgactgaggtcgaaacacccatccgcaacgagtggggctcgagatctaacggcggcggaggcagtggtggtggcggcagcggaggggggggctctggtggaggaggttcttcgcttcttaccgaagtcgagacaccgatccgcaacgagtggggcagtagaagtaacggaggcggaggttccggaggcggtgggagcggaggcggcggatcgggcggtggagggtccagccttctcactgaagtggagaccccaactcgcagcgaatgggaatcgcgaagttcgggcggggggggaagcggaggaggtggctccggaggaggcggaagcggaggaggcggctcgagccttctgaccgaggtggaaaccccaacgaggaatgagtgggaatcgcgctcgtccggcggcggcggttctggtggtggcggctccggaggcggcggctctggcggcgggggatcctcgcttcttaccgaggttgagactctgactcgcaacggctggggttgtcgatgttcgggtaagcctatccctaaccctctcctcggtctcgattctacggctgcgggaacagccagtcacgtttccatttttgccatggtgatcggacttattggctctatcgcagcttgtgtcgcgtaagcggccgcttccatggttttaattaatcaccgttgtgctcacttctcaaatcgacaaaggaaacacacttcgtgcagcatgtgccccat

SEQ ID NO: 207 - protein, 996 aa, artificial sequence
  fusion protein
MQKPVCLVVAMTPKRGIGINNGLPWPHLTTDFKHFRRVTKTTPEEASRLNGWLPRKFAKTGDSGLPSPSVGKRFNAVVMGRKNWESMPRKFRPLVDRLNIVVSSSLKEEDIAAEKPQAEGQQRVRVCASLPAALSLLEEEYKDSVDQIFVVGGAGLYEAALSLGVASHLYITRVAREFPCDVFFPAFPGDDILSNKSTAAQAAAPAESVFVPFCPELGREKDNEATYRPIFISKTFSDNGVPYDSVVLEKRRKTDDAATAEPSNAMSSLTSTRETTPVHGLQAPSSAAAIAPVLAWMDEEDRKKREQKELIRAVPHVHFRGHEEFQYLDLIADIINNGRTMDDRTGVGVISKFGCTMRYSLDQAFPLLTTKRVFWKGVLEELLWFIRGDTNANHLSEKGVKIWDKNVTREFLDSRNLPHREVGDIGPGYGFQWRHFGAAYKDMHTDYTGQGVDQLKNVIQMLRTNPTDRRMLMTAWNPAALDEMALPPCHLLCQFYVNDQKELSCIMYQRSCDVGLGVPFNIASYSLLTLMVAHVCNLKPKEFIHFMGNTHVYTNHVEALKEQLRREPRPFPIVNILNKERIKEIDDFTAEDFEVVGYVPHGRIQMEMAVEVHTNQDPLDMASYPCHQHASAFDQAARSRGHNNRRTALRPRRQQKATEVRLEQKMPTLLRVYIDGPHGMGKTTTTQLLVALGSRDDIVYVPEPMTYWRVLGASETIANIYTTQHRLDQGEISAGDAAVVMTSAQITMGMPYAVTDAVLAPHIGGEAGSSHAPPPALTLIFDRHPIAALLCYPAARYLMGSMTPQAVLAFVALIPPTLPGTNIVLGALPEDRHIDRLAKRQRPGERLDLAMLAAIRRVYGLLANTVRYLQGGGSWREDWGQLSGAAVPPQGAEPQSNAGPRPHIGDTLFTLFRAPELLAPNGDLYNVFAWALDVLAKRLRPMHVFILDYDQSPAGCRDALLQLTSGMVQTHVTTPGSIPTICDLARTFAREMGEAN

SEQ ID NO: 208 - protein, 19 aa, Human influenza virus I
SLLTEVETPIRNEWGSRSN

SEQ ID NO: 209 - protein, 19 aa, Pork influenza virus I
SLLTEVETPTRSEWESRSS

SEQ ID NO: 210 - protein, 19 aa, Avian influenza virus I
SLLTEVETPTRNEWESRSS

SEQ ID NO: 211 - protein, 19 aa, Avian influenza virus II
SLLTEVETLTRNGWGCRCS

SEQ ID NO: 212 - DNA, 57 bp, Human influenza virus I
tccttgctgactgaggtcgaaacacccatccgcaacgagtggggctcgagatctaac

SEQ ID NO: 213 - DNA, 57 bp, Pork influenza virus I
agccttctcactgaagtggagaccccaactcgcagcgaatgggaatcgcgaagttcg

SEQ ID NO: 214 - DNA, 57 bp, Avian influenza virus I
agccttctgaccgaggtggaaaccccaacgaggaatgagtgggaatcgcgctcgtcc

SEQ ID NO: 215 - DNA, 57 bp, Avian influenza virus II
tcgcttcttaccgaggttgagactctgactcgcaacggctggggttgtcgatgttcg

SEQ ID NO: 216 - DNA, 109 bp, artificial sequence
  theoretical sequence
caggtgttgcgcttcttttcttgcgtgatcaaagcttataacttcgtataatgtatgctatacgaagttatggatcccatttgtagatacggttgcacacactagtctt

SEQ ID NO: 217 - DNA, 106 bp, artificial sequence
  theoretical sequence
gagtcatttccaagggttatagctcatcgatgaagcttataacttcgtatagtataccttatacgaagttatggatctagacatgctgatgaagaagggaagttcc

SEQ ID NO: 218 - DNA, 119 bp, artificial sequence
  theoretical sequence
tgagcttgacccggctatagaatttacctgcatcgatgaagcttataacttcgtatagtataccttatacgaagttatggatctagaaggctctgaaaaatgttgaaaacgcatgtgta

SEQ ID NO: 219 - DNA, 111 bp, artificial sequence
  theoretical sequence
ttgtctttgcgctgatctccgctctcagagactcgctgaagcttataacttcgtataatgtatgctatacgaagttatggatccactagtttacgtatcgcgactagcagc

SEQ ID NO: 220 - DNA, 107 bp, artificial sequence
  theoretical sequence
ttagcagtccagccctgaagtgtttgtcaatgcaccactggataacttcgtataggatactttatacgaagttatggatccactagttgactgccacgtgtagtatc

SEQ ID NO: 221 - DNA, 9830 bp, artificial sequence
  plasmid
cgataagcttgaacacgcgtctcagggtgcgtggttagaacacgcgtctcagggtgcgtggttagaacacgcgtctcagggtgcgtggttggaacacgcgtgtcagggtgcgtggttggaacacgcgtctcaaggtttgtggttaagcttgcctgcattgggtgcggttggtgatcctggttggaccggtggagatgcgcgcgcacgaaggggatgtgtcagaaacattttgtttgttctctgtgaacttttagatgtgttaaaggcggcgaatattagcagagagtcctccttgttggattctctcttgaatttcgccctttccttctctttgcgagtctcgtagagaacaagcactcgttcgccgtccctgacgacgcaacccgcgcagaagacatccaccaaacggtgttacacaatcaccttgtgtgaagttcttgcggaaaactactcgttggcattttttcttgaattccctgtttcgacaaaatgcatgagaaaaaaatcactggatataccaccgttgatatatcccaatggcatcgtaaagaacattttgaggcatttcagtcagttgctcaatgtacctataaccagaccgttcagctggatattacggcctttttaaagaccgtaaagaaaaataagcacaagttttatccggcctttattcacattcttgcccgcctgatgaatgctcatccggaattccgtatggcaatgaaagacggtgagctggtgatatgggatagtgttcacccttgttacaccgttttccatgagcaaactgaaacgttttcatcgctctggagtgaataccacgacgatttccggcagtttctacacatatattcgcaagatgtggcgtgttacggtgaaaacctggcctatttccctaaagggtttattgagaatatgtttttcgtctcagccaatccctgggtgagtttcaccagttttgatttaaacgtggccaatatggacaacttcttcgcccccgttttcaccatgggcaaatattatacgcaaggcgacaaggtgctgatgccgctggcgattcaggttcatcatgccgtctgtgatggcttccatgtcggcagaatgcttaatgaattacaacagtactgcgatgagtggcagggcggggctcctaggatggtgagcaagggcgaggagctgttcaccggggtggtgcccatcctggtcgagctggacggcgacgtaaacggccacaagttcagcgtgtccggcgagggcgagggcgatgccacctacggcaagctgaccctgaagttcatctgcaccaccggcaagctgcccgtgccctggcccaccctcgtgaccaccctgacctacggcgtgcagtgcttcagccgctaccccgaccacatgaagcagcacgacttcttcaagtccgccatgcccgaaggctacgtccaggagcgcaccatcttcttcaaggacgacggcaactacaagacccgcgccgaggtgaagttcgagggcgacaccctggtgaaccgcatcgagctgaagggcatcgacttcaaggaggacggcaacatcctggggcacaagctggagtacaactacaacagccacaacgtctatatcatggccgacaagcagaagaacggcatcaaggtgaacttcaagatccgccacaacatcgaggacggcagcgtgcagctcgccgaccactaccagcagaacacccccatcggcgacggccccgtgctgctgcccgacaaccactacctgagcacccagtccgccctgagcaaagaccccaacgagaagcgcgatcacatggtcctgctggagttcgtgaccgccgccgggatcactctcggcatggacgagctgtacaagtactcagatctcgagctcgctaggaatgcattagaggtccacacgaaccaggacccgctcgattaagcggccgcttccatggttttaattaatcaccgttgtgctcacttctcaaatcgacaaaggaaacacacttcgtgcagcatgtgccccattataaagaaactgagttgttccgctgtggcttgcaggtgtcacatccacaaaaaccggccgactctaaataggagtgtttcgcagcaagcagcgaaagtttatgactgggtccgaatctctgaacggatgtgtggcggacctggctgatgttgatcgccgtcgacacacgcgccacatgggtcaatacacaagacagctatcagttgttttagtcgaaccggttaacacaattcttgcccccccgaggcgcgccaacctaggagggcccgggcgccatggcagctgacgtcttatgcttctgagatatcttcaaaagatatatagctaatggcgtataagattatttaaaataaatttttagccaaactgtctcacgacgttttgaacccagtctagaatcctgcaagtgcatagaaggaaagttgtctgctgtcgtgggcagacagcaacagtccagcactctagcggcatacagaacgataacgcattcacgagtggatacacgcacatctgcgtcacccgcaactcgctttcgttctgattgacaaaaagaaaacaaggcgaggtgagactgtgtgaaatgccacatgaagagtcatcccttttcttcgataaaggacacaggggtctctggcaccccctcgtcagctctctccgacccgaggcactctccctgatccctccgaaaagagaggaaaacgagagacgggcagcttctgtatttccgttagttagcctcccccatctcccgggcaaacgtgcgcgccaggtcgcagatcgtcggtatggagcctggggtggtgacgtgggtctggaccatcccggaggtaagttgcagcagggcgtcccggcagccggcgggcgattggtcgtaatccaggataaagacatgcatgggacggaggcgtttggccaagacgtccaaagcccaggcaaacacgttatacaggtcgccgttgggggccagcaactcgggggcccgaaacagggtaaataacgtgtccccgatatggggtcgtgggcccgcgttgctctggggctcggcaccctggggcggcacggccgcccccgaaagctgtccccaatcctcccgccacgacccgccgccctgcagataccgcaccgtattggcaagcagcccataaacgcggcgaatcgcggccagcatagccaggtcaagccgctcgccggggcgctggcgtttggccaggcggtcgatgtgtctgtcctccggaagggcccccaacacgatgtttgtgccgggcaaggtcggcgggatgagggccacgaacgccagcacggcctggggggtcatgctgcccataaggtatcgcgcggccgggtagcacaggagggcggcgatgggatggcggtcgaagatgagggtgagggccgggggcggggcatgtgagctcccagcctcccccccgatatgaggagccagaacggcgtcggtcacggcataaggcatgcccattgttatctgggcgcttgtcattaccaccgccgcgtccccggccgatatctcaccctggtcgaggcggtgttgtgtggtgtagatgttcgcgattgtctcggaagcccccaacacccgccagtaagtcatcggctcgggtacgtagacgatatcgtcgcgcgaacccagggccaccagcagttgcgtggtggtggttttccccatcccgtggggaccgtctatataaacccgcagtagcgtgggcattttctgctccaggcggacttccgtggctttttgttgccggcgagggcgcaacgccgtacgtcggttgttatggccgcgagaacgcgcagcctggtcgaacgcagacgcgtgttgatggcaggggtacgaagccatgtcaagtggatcctggttagtatggacctcgacagccatctccatctggattcgtccgtgcgggacgtagcccacgacctcaaaatcctcggcggtgaaatcgtcgatttccttgatgcgttccttgttgaggatgttcacaatggggaacggtctcggttctctccgcagctgctcttttaaagcctcgacatggttcgtgtagacatgcgtgttccccatgaagtgaatgaactccttaggttttaggttgcagacgtgtgcaaccatgagcgtcaaaagcgaataggaagcgatgttgaaggggacgccgaggccgacatcgcacgaccgctgatacatgatgcacgacagctccttctggtcgttcacgtagaactggcacaacaagtgacaaggcggcagcgccatttcgtccagcgctgcaggattccaggcagtcatgagcatgcgacgatctgttggattcgttctcagcatctggatcacattcttcagctggtcgacgccctgccctgtgtagtctgtgtgcatgtctttgtatgccgcgccgaagtgtctccactggaagccgtagcccgggccgatgtctccgacctctcggtgggggagattgcgcgaatcgaggaactcgcgtgtcacattcttgtcccagatcttcacgcccttctcagaaagatggtttgcgttcgtgtcgccgcgaatgaaccacagcaactcttcgaggacccctttccagaacacacgctttgtggtgagaagtggaaaggcctgatccagcgagtagcgcatagtgcagccgaatttggagatgacaccaacgcccgttcggtcatccattgtccttccattgttaataatgtcggcaatgagatcaaggtactggaattcttcatggcctctaaagtgaacatgcggaacggcccgaatcagttccttttgctcgcgttttttccggtcttcttcgtccatccacgccaacaccggggcaatggctgcggccgaagaaggagcctgcaacccgtgcacgggagttgtctccctcgtggacgtcaaggagctcattgcgttgctcggttccgcagtggctgcgtcgtcagtcttccttctcttctcgagaaccacggagtcgtagggtaccccgttgtctgagaaggtcttggaaatgaagatgggtcgatacgtcgcttcattgtccttctctcttccgagctccggacaaaagggaacgaacacagactcggcaggagctgcagcctgcgcagcagttgatttgtttgaaagaatgtcatctccggggaacgcagggaagaaaacgtcgcacggaaactcgcgggctacacgcgtgatgtacaggtgagaggcaacgcccagagacagcgctgcctcgtacagtcccgctcctcccacgacaaaaatctggtcgacagaatccttgtactcttcctccagaaggctgagagctgctgggagtgaagcacagactcggacgcgctgctggccttcagcttgaggcttctccgccgcaatgtcttcttctttgagggaagaggaaacgacgatgttcaatctgtccacgaggggtctaaactttcgaggcatgctttcccagtttttccgtcccatgacaacggcgttgaatctcttgccgactgatggagagggaagtccagagtcgcccgtctttgcaaatttcctgggaagccacccgttcaggcgactggcttcttcgggcgtcgtttttgtcacacgacgaaagtgtttgaaatctgtggtcaagtggggccacgggaggccgttgttgatgccgatgcccctcttgggggtcatcgcgacgaccagacacaccggtttctgcatcttcccagacacgacaacgccccgtagagcagaaacgcactactaaagcgaaacttcacccgtccctgctgcactcagagcagtgctccgcactgccgtgtggtaaaatgaaaaggttctacgagacacgcgtctccggatcgacaagcgaaggatctgcacacctggtctcgatgtcgaacaaagcacggaggagagacggaaagtgcttacatcgaacacggttatcaaacccgagaaaaagaaacgaacagaagaaaaaggaaacctccgcatacttttaaagaatgaagttccccgattttcccaaaaatggcgtcattttcgcgcacggcagtcagataacaggtgtagcggctgcccaccaacagagacggcgcggccgacaggacgctactgggactgcgaacagcagcaagatcggatcttccgcgggcgggtttgaatgcaaggtttcgtgctgtcgaaaaagagaatggaacttaatgtccacgtagttcgcgcatgaaaagcgtcctaccactcaaaaaagacaaaaaccgcactcgcggcgttgaatgtgcgggggaacggatggctctcttttttggaaagcgaatgcaaaaagacaagacgcagacgcatacaacgttagtcccctggcacgagagatagaggtgctgggggccattgcggtgtcgtggatttaccagtcatggacgagatcgttccggagcctgtctttcctgaaagtctgaaaaaattgcgggaaagtcacgcatatggaacagcaccggggcgggacagagttgtctcgacaacgaatgacacacaggaactacgcggggggtgaaaatcgaatgacatgctagcgttcaacttctggaaaggtggtggcttctcgatcaggaaactccgttttctagtgttgaacaggtgcgctccgagaaatcgcacgcgggctaatacgtggtaagacaaaagaccagcctgtcgccggatttagaagtcgtggcactacatacggacctctgtacgagacatgccgatgccaagggcgttatctggtgcctgtgaccgccagtttcagacagtacgcgtctactaagtttgaaaacgcatatgaacgcgtttgtcggttaccattcattctgcaactgtctcaggcattgcgtgagcaaagcgagcgcctcgctggtagtcccaactgaatattatcgagtaagcacactactccacggacatccctagcgctcttacctgttcgtagggctagagaaatgattcggatatggttacacgtgaccacgccaaagtagaaaggaattagcataactcagtcaggcagtctccctgaggacacctgcttgatgatttgtgaggacgactcacgggatttacagcctggcgaagcttctgggttcaaaacgtcgtgagacagtttggtgagatatcttcaaaagatatatagctaatggcgtataagattatttaaaataaatttttagtcctagtcagaattgtggattatatttttaacaggttctaggcgcctgatgcggtattttctccttacgcatctgtgcggtatttcacaccgcatatggtgcactctcagtacaatctgctctgatgccgcatagttaagccagccccgacacccgccaacacccgctgacgcgccctgacgggcttgtctgctcccggcatccgcttacagacaagctgtgaccgtctccgggagctgcatgtgtcagaggttttcaccgtcatcaccgaaacgcgcgagacgaaagggcctcgtgatacgcctatttttataggttaatgtcatgataataatggtttcttagacgtcaggtggcacttttcggggaaatgtgcgcggaacccctatttgtttatttttctaaatacattcaaatatgtatccgctcatgagacaataaccctgataaatgcttcaataatattgaaaaaggaagagtatgagtattcaacatttccgtgtcgcccttattcccttttttgcggcattttgccttcctgtttttgctcacccagaaacgctggtgaaagtaaaagatgctgaagatcagttgggtgcacgagtgggttacatcgaactggatctcaacagcggtaagatccttgagagttttcgccccgaagaacgttttccaatgatgagcacttttaaagttctgctatgtggcgcggtattatcccgtattgacgccgggcaagagcaactcggtcgccgcatacactattctcagaatgacttggttgagtactcaccagtcacagaaaagcatcttacggatggcatgacagtaagagaattatgcagtgctgccataaccatgagtgataacactgcggccaacttacttctgacaacgatcggaggaccgaaggagctaaccgcttttttgcacaacatgggggatcatgtaactcgccttgatcgttgggaaccggagctgaatgaagccataccaaacgacgagcgtgacaccacgatgcctgtagcaatggcaacaacgttgcgcaaactattaactggcgaactacttactctagcttcccggcaacaattaatagactggatggaggcggataaagttgcaggaccacttctgcgctcggcccttccggctggctggtttattgctgataaatctggagccggtgagcgtgggtctcgcggtatcattgcagcactggggccagatggtaagccctcccgtatcgtagttatctacacgacggggagtcaggcaactatggatgaacgaaatagacagatcgctgagataggtgcctcactgattaagcattggtaactgtcagaccaagtttactcatatatactttagattgatttaaaacttcatttttaatttaaaaggatctaggtgaagatcctttttgataatctcatgaccaaaatcccttaacgtgagttttcgttccactgagcgtcagaccccgtagaaaagatcaaaggatcttcttgagatcctttttttctgcgcgtaatctgctgcttgcaaacaaaaaaaccaccgctaccagcggtggtttgtttgccggatcaagagctaccaactctttttccgaaggtaactggcttcagcagagcgcagataccaaatactgttcttctagtgtagccgtagttaggccaccacttcaagaactctgtagcaccgcctacatacctcgctctgctaatcctgttaccagtggctgctgccagtggcgataagtcgtgtcttaccgggttggactcaagacgatagttaccggataaggcgcagcggtcgggctgaacggggggttcgtgcacacagcccagcttggagcgaacgacctacaccgaactgagatacctacagcgtgagctttgagaaagcgccacgcttcccgaagggagaaaggcggacaggtatccggtaagcggcagggtcggaacaggagagcgcacgagggagcttccagggggaaacgcctggtatctttatagtcctgtcgggtttcgccacctctgacttgagcgtcgatttttgtgatgctcgtcaggggggcggagcctatggaaaaacgccagcaacgcggcctttttacggttcctggccttttgctggccttttgctcacatgttctttcctgcgttatcccctgattctgtggataaccgtattaccgcctttgagtgagctgataccgctcgccgcagccgaacgaccgagcgcagcgagtcagtgagcgaggaagcggaagagcgcccaatacgcaaaccgcctctccccgcgcgttggccgattcattaatgcagctggcacgacaggtttcccgactggaaagcgggcagtgagcgcaacgcaattaatgtgagttagctcactcattaggcaccccaggctttacactttatgcttccggctcgtatgttgtgtggaattgtgagcggataacaatttcacacaggaaacagctatgaccatgattacgaattcgagctcggtacccggggatcctctagaagtatactaataacttcgtataatgtatgctatacgaagttataaactagtat

SEQ ID NO: 222 - DNA, 1488 bp, artificial sequence
  PCR product
ttgaattccctgtttcgacaaaatgcatgagaaaaaaatcactggatataccaccgttgatatatcccaatggcatcgtaaagaacattttgaggcatttcagtcagttgctcaatgtacctataaccagaccgttcagctggatattacggcctttttaaagaccgtaaagaaaaataagcacaagttttatccggcctttattcacattcttgcccgcctgatgaatgctcatccggaattccgtatggcaatgaaagacggtgagctggtgatatgggatagtgttcacccttgttacaccgttttccatgagcaaactgaaacgttttcatcgctctggagtgaataccacgacgatttccggcagtttctacacatatattcgcaagatgtggcgtgttacggtgaaaacctggcctatttccctaaagggtttattgagaatatgtttttcgtctcagccaatccctgggtgagtttcaccagttttgatttaaacgtggccaatatggacaacttcttcgcccccgttttcaccatgggcaaatattatacgcaaggcgacaaggtgctgatgccgctggcgattcaggttcatcatgccgtctgtgatggcttccatgtcggcagaatgcttaatgaattacaacagtactgcgatgagtggcagggcggggctcctaggatggtgagcaagggcgaggagctgttcaccggggtggtgcccatcctggtcgagctggacggcgacgtaaacggccacaagttcagcgtgtccggcgagggcgagggcgatgccacctacggcaagctgaccctgaagttcatctgcaccaccggcaagctgcccgtgccctggcccaccctcgtgaccaccctgacctacggcgtgcagtgcttcagccgctaccccgaccacatgaagcagcacgacttcttcaagtccgccatgcccgaaggctacgtccaggagcgcaccatcttcttcaaggacgacggcaactacaagacccgcgccgaggtgaagttcgagggcgacaccctggtgaaccgcatcgagctgaagggcatcgacttcaaggaggacggcaacatcctggggcacaagctggagtacaactacaacagccacaacgtctatatcatggccgacaagcagaagaacggcatcaaggtgaacttcaagatccgccacaacatcgaggacggcagcgtgcagctcgccgaccactaccagcagaacacccccatcggcgacggccccgtgctgctgcccgacaaccactacctgagcacccagtccgccctgagcaaagaccccaacgagaagcgcgatcacatggtcctgctggagttcgtgaccgccgccgggatcactctcggcatggacgagctgtacaagtactcagatctcgagctcgctaggaatgcattagaggtccacacgaaccaggacccgctcgattaagcggccgcttccatggt

SEQ ID NO: 223 - DNA, 33 bp, artificial sequence
  primer
ttgaattccctgtttcgacaaaatgcatgagaa

SEQ ID NO: 224 - DNA, 36 bp, artificial sequence
  primer
accatggaagcggccgcttaatcgagcgggtcctgg

SEQ ID NO: 225 - DNA, 9830 bp, artificial sequence
  plasmid
cgataagcttgaacacgcgtctcagggtgcgtggttagaacacgcgtctcagggtgcgtggttagaacacgcgtctcagggtgcgtggttggaacacgcgtgtcagggtgcgtggttggaacacgcgtctcaaggtttgtggttaagcttgcctgcattgggtgcggttggtgatcctggttggaccggtggagatgcgcgcgcacgaaggggatgtgtcagaaacattttgtttgttctctgtgaacttttagatgtgttaaaggcggcgaatattagcagagagtcctccttgttggattctctcttgaatttcgccctttccttctctttgcgagtctcgtagagaacaagcactcgttcgccgtccctgacgacgcaacccgcgcagaagacatccaccaaacggtgttacacaatcaccttgtgtgaagttcttgcggaaaactactcgttggcattttttcttgaattccctgtttcgacaaaatgcatgagaaaaaaatcactggatataccaccgttgatatatcccaatggcatcgtaaagaacattttgaggcatttcagtcagttgctcaatgtacctataaccagaccgttcagctggatattacggcctttttaaagaccgtaaagaaaaataagcacaagttttatccggcctttattcacattcttgcccgcctgatgaatgctcatccggaattccgtatggcaatgaaagacggtgagctggtgatatgggatagtgttcacccttgttacaccgttttccatgagcaaactgaaacgttttcatcgctctggagtgaataccacgacgatttccggcagtttctacacatatattcgcaagatgtggcgtgttacggtgaaaacctggcctatttccctaaagggtttattgagaatatgtttttcgtctcagccaatccctgggtgagtttcaccagttttgatttaaacgtggccaatatggacaacttcttcgcccccgttttcaccatgggcaaatattatacgcaaggcgacaaggtgctgatgccgctggcgattcaggttcatcatgccgtctgtgatggcttccatgtcggcagaatgcttaatgaattacaacagtactgcgatgagtggcagggcggggctcctaggatggtgagcaagggcgaggagctgttcaccggggtggtgcccatcctggtcgagctggacggcgacgtaaacggccacaagttcagcgtgtccggcgagggcgagggcgatgccacctacggcaagctgaccctgaagttcatctgcaccaccggcaagctgcccgtgccctggcccaccctcgtgaccaccctgacctacggcgtgcagtgcttcagccgctaccccgaccacatgaagcagcacgacttcttcaagtccgccatgcccgaaggctacgtccaggagcgcaccatcttcttcaaggacgacggcaactacaagacccgcgccgaggtgaagttcgagggcgacaccctggtgaaccgcatcgagctgaagggcatcgacttcaaggaggacggcaacatcctggggcacaagctggagtacaactacaacagccacaacgtctatatcatggccgacaagcagaagaacggcatcaaggtgaacttcaagatccgccacaacatcgaggacggcagcgtgcagctcgccgaccactaccagcagaacacccccatcggcgacggccccgtgctgctgcccgacaaccactacctgagcacccagtccgccctgagcaaagaccccaacgagaagcgcgatcacatggtcctgctggagttcgtgaccgccgccgggatcactctcggcatggacgagctgtacaagtactcagatctcgagctcgctaggaatgcattagaggtccacacgaaccaggacccgctcgattaagcggccgcttccatggttttaattaatcaccgttgtgctcacttctcaaatcgacaaaggaaacacacttcgtgcagcatgtgccccattataaagaaactgagttgttccgctgtggcttgcaggtgtcacatccacaaaaaccggccgactctaaataggagtgtttcgcagcaagcagcgaaagtttatgactgggtccgaatctctgaacggatgtgtggcggacctggctgatgttgatcgccgtcgacacacgcgccacatgggtcaatacacaagacagctatcagttgttttagtcgaaccggttaacacaattcttgcccccccgaggcgcgccaacctaggagggcccgggcgccatggcagctgacgtcttatgcttctgagatatcttcaaaagatatatagctaatggcgtataagattatttaaaataaatttttagccaaactgtctcacgacgttttgaacccagtctagaatcctgcaagtgcatagaaggaaagttgtctgctgtcgtgggcagacagcaacagtccagcactctagcggcatacagaacgataacgcattcacgagtggatacacgcacatctgcgtcacccgcaactcgctttcgttctgattgacaaaaagaaaacaaggcgaggtgagactgtgtgaaatgccacatgaagagtcatcccttttcttcgataaaggacacaggggtctctggcaccccctcgtcagctctctccgacccgaggcactctccctgatccctccgaaaagagaggaaaacgagagacgggcagcttctgtatttccgttagttagcctcccccatctcccgggcaaacgtgcgcgccaggtcgcagatcgtcggtatggagcctggggtggtgacgtgggtctggaccatcccggaggtaagttgcagcagggcgtcccggcagccggcgggcgattggtcgtaatccaggataaagacatgcatgggacggaggcgtttggccaagacgtccaaagcccaggcaaacacgttatacaggtcgccgttgggggccagcaactcgggggcccgaaacagggtaaataacgtgtccccgatatggggtcgtgggcccgcgttgctctggggctcggcaccctggggcggcacggccgcccccgaaagctgtccccaatcctcccgccacgacccgccgccctgcagataccgcaccgtattggcaagcagcccataaacgcggcgaatcgcggccagcatagccaggtcaagccgctcgccggggcgctggcgtttggccaggcggtcgatgtgtctgtcctccggaagggcccccaacacgatgtttgtgccgggcaaggtcggcgggatgagggccacgaacgccagcacggcctggggggtcatgctgcccataaggtatcgcgcggccgggtagcacaggagggcggcgatgggatggcggtcgaagatgagggtgagggccgggggcggggcatgtgagctcccagcctcccccccgatatgaggagccagaacggcgtcggtcacggcataaggcatgcccattgttatctgggcgcttgtcattaccaccgccgcgtccccggccgatatctcaccctggtcgaggcggtgttgtgtggtgtagatgttcgcgattgtctcggaagcccccaacacccgccagtaagtcatcggctcgggtacgtagacgatatcgtcgcgcgaacccagggccaccagcagttgcgtggtggtggttttccccatcccgtggggaccgtctatataaacccgcagtagcgtgggcattttctgctccaggcggacttccgtggctttttgttgccggcgagggcgcaacgccgtacgtcggttgttatggccgcgagaacgcgcagcctggtcgaacgcagacgcgtgttgatggcaggggtacgaagccatgtcaagtggatcctggttagtatggacctcgacagccatctccatctggattcgtccgtgcgggacgtagcccacgacctcaaaatcctcggcggtgaaatcgtcgatttccttgatgcgttccttgttgaggatgttcacaatggggaacggtctcggttctctccgcagctgctcttttaaagcctcgacatggttcgtgtagacatgcgtgttccccatgaagtgaatgaactccttaggttttaggttgcagacgtgtgcaaccatgagcgtcaaaagcgaataggaagcgatgttgaaggggacgccgaggccgacatcgcacgaccgctgatacatgatgcacgacagctccttctggtcgttcacgtagaactggcacaacaagtgacaaggcggcagcgccatttcgtccagcgctgcaggattccaggcagtcatgagcatgcgacgatctgttggattcgttctcagcatctggatcacattcttcagctggtcgacgccctgccctgtgtagtctgtgtgcatgtctttgtatgccgcgccgaagtgtctccactggaagccgtagcccgggccgatgtctccgacctctcggtgggggagattgcgcgaatcgaggaactcgcgtgtcacattcttgtcccagatcttcacgcccttctcagaaagatggtttgcgttcgtgtcgccgcgaatgaaccacagcaactcttcgaggacccctttccagaacacacgctttgtggtgagaagtggaaaggcctgatccagcgagtagcgcatagtgcagccgaatttggagatgacaccaacgcccgttcggtcatccattgtccttccattgttaataatgtcggcaatgagatcaaggtactggaattcttcatggcctctaaagtgaacatgcggaacggcccgaatcagttccttttgctcgcgttttttccggtcttcttcgtccatccacgccaacaccggggcaatggctgcggccgaagaaggagcctgcaacccgtgcacgggagttgtctccctcgtggacgtcaaggagctcattgcgttgctcggttccgcagtggctgcgtcgtcagtcttccttctcttctcgagaaccacggagtcgtagggtaccccgttgtctgagaaggtcttggaaatgaagatgggtcgatacgtcgcttcattgtccttctctcttccgagctccggacaaaagggaacgaacacagactcggcaggagctgcagcctgcgcagcagttgatttgtttgaaagaatgtcatctccggggaacgcagggaagaaaacgtcgcacggaaactcgcgggctacacgcgtgatgtacaggtgagaggcaacgcccagagacagcgctgcctcgtacagtcccgctcctcccacgacaaaaatctggtcgacagaatccttgtactcttcctccagaaggctgagagctgctgggagtgaagcacagactcggacgcgctgctggccttcagcttgaggcttctccgccgcaatgtcttcttctttgagggaagaggaaacgacgatgttcaatctgtccacgaggggtctaaactttcgaggcatgctttcccagtttttccgtcccatgacaacggcgttgaatctcttgccgactgatggagagggaagtccagagtcgcccgtctttgcaaatttcctgggaagccacccgttcaggcgactggcttcttcgggcgtcgtttttgtcacacgacgaaagtgtttgaaatctgtggtcaagtggggccacgggaggccgttgttgatgccgatgcccctcttgggggtcatcgcgacgaccagacacaccggtttctgcatcttcccagacacgacaacgccccgtagagcagaaacgcactactaaagcgaaacttcacccgtccctgctgcactcagagcagtgctccgcactgccgtgtggtaaaatgaaaaggttctacgagacacgcgtctccggatcgacaagcgaaggatctgcacacctggtctcgatgtcgaacaaagcacggaggagagacggaaagtgcttacatcgaacacggttatcaaacccgagaaaaagaaacgaacagaagaaaaaggaaacctccgcatacttttaaagaatgaagttccccgattttcccaaaaatggcgtcattttcgcgcacggcagtcagataacaggtgtagcggctgcccaccaacagagacggcgcggccgacaggacgctactgggactgcgaacagcagcaagatcggatcttccgcgggcgggtttgaatgcaaggtttcgtgctgtcgaaaaagagaatggaacttaatgtccacgtagttcgcgcatgaaaagcgtcctaccactcaaaaaagacaaaaaccgcactcgcggcgttgaatgtgcgggggaacggatggctctcttttttggaaagcgaatgcaaaaagacaagacgcagacgcatacaacgttagtcccctggcacgagagatagaggtgctgggggccattgcggtgtcgtggatttaccagtcatggacgagatcgttccggagcctgtctttcctgaaagtctgaaaaaattgcgggaaagtcacgcatatggaacagcaccggggcgggacagagttgtctcgacaacgaatgacacacaggaactacgcggggggtgaaaatcgaatgacatgctagcgttcaacttctggaaaggtggtggcttctcgatcaggaaactccgttttctagtgttgaacaggtgcgctccgagaaatcgcacgcgggctaatacgtggtaagacaaaagaccagcctgtcgccggatttagaagtcgtggcactacatacggacctctgtacgagacatgccgatgccaagggcgttatctggtgcctgtgaccgccagtttcagacagtacgcgtctactaagtttgaaaacgcatatgaacgcgtttgtcggttaccattcattctgcaactgtctcaggcattgcgtgagcaaagcgagcgcctcgctggtagtcccaactgaatattatcgagtaagcacactactccacggacatccctagcgctcttacctgttcgtagggctagagaaatgattcggatatggttacacgtgaccacgccaaagtagaaaggaattagcataactcagtcaggcagtctccctgaggacacctgcttgatgatttgtgaggacgactcacgggatttacagcctggcgaagcttctgggttcaaaacgtcgtgagacagtttggtgagatatcttcaaaagatatatagctaatggcgtataagattatttaaaataaatttttagtcctagtcagaattgtggattatatttttaacaggttctaggcgcctgatgcggtattttctccttacgcatctgtgcggtatttcacaccgcatatggtgcactctcagtacaatctgctctgatgccgcatagttaagccagccccgacacccgccaacacccgctgacgcgccctgacgggcttgtctgctcccggcatccgcttacagacaagctgtgaccgtctccgggagctgcatgtgtcagaggttttcaccgtcatcaccgaaacgcgcgagacgaaagggcctcgtgatacgcctatttttataggttaatgtcatgataataatggtttcttagacgtcaggtggcacttttcggggaaatgtgcgcggaacccctatttgtttatttttctaaatacattcaaatatgtatccgctcatgagacaataaccctgataaatgcttcaataatattgaaaaaggaagagtatgagtattcaacatttccgtgtcgcccttattcccttttttgcggcattttgccttcctgtttttgctcacccagaaacgctggtgaaagtaaaagatgctgaagatcagttgggtgcacgagtgggttacatcgaactggatctcaacagcggtaagatccttgagagttttcgccccgaagaacgttttccaatgatgagcacttttaaagttctgctatgtggcgcggtattatcccgtattgacgccgggcaagagcaactcggtcgccgcatacactattctcagaatgacttggttgagtactcaccagtcacagaaaagcatcttacggatggcatgacagtaagagaattatgcagtgctgccataaccatgagtgataacactgcggccaacttacttctgacaacgatcggaggaccgaaggagctaaccgcttttttgcacaacatgggggatcatgtaactcgccttgatcgttgggaaccggagctgaatgaagccataccaaacgacgagcgtgacaccacgatgcctgtagcaatggcaacaacgttgcgcaaactattaactggcgaactacttactctagcttcccggcaacaattaatagactggatggaggcggataaagttgcaggaccacttctgcgctcggcccttccggctggctggtttattgctgataaatctggagccggtgagcgtgggtctcgcggtatcattgcagcactggggccagatggtaagccctcccgtatcgtagttatctacacgacggggagtcaggcaactatggatgaacgaaatagacagatcgctgagataggtgcctcactgattaagcattggtaactgtcagaccaagtttactcatatatactttagattgatttaaaacttcatttttaatttaaaaggatctaggtgaagatcctttttgataatctcatgaccaaaatcccttaacgtgagttttcgttccactgagcgtcagaccccgtagaaaagatcaaaggatcttcttgagatcctttttttctgcgcgtaatctgctgcttgcaaacaaaaaaaccaccgctaccagcggtggtttgtttgccggatcaagagctaccaactctttttccgaaggtaactggcttcagcagagcgcagataccaaatactgttcttctagtgtagccgtagttaggccaccacttcaagaactctgtagcaccgcctacatacctcgctctgctaatcctgttaccagtggctgctgccagtggcgataagtcgtgtcttaccgggttggactcaagacgatagttaccggataaggcgcagcggtcgggctgaacggggggttcgtgcacacagcccagcttggagcgaacgacctacaccgaactgagatacctacagcgtgagctttgagaaagcgccacgcttcccgaagggagaaaggcggacaggtatccggtaagcggcagggtcggaacaggagagcgcacgagggagcttccagggggaaacgcctggtatctttatagtcctgtcgggtttcgccacctctgacttgagcgtcgatttttgtgatgctcgtcaggggggcggagcctatggaaaaacgccagcaacgcggcctttttacggttcctggccttttgctggccttttgctcacatgttctttcctgcgttatcccctgattctgtggataaccgtattaccgcctttgagtgagctgataccgctcgccgcagccgaacgaccgagcgcagcgagtcagtgagcgaggaagcggaagagcgcccaatacgcaaaccgcctctccccgcgcgttggccgattcattaatgcagctggcacgacaggtttcccgactggaaagcgggcagtgagcgcaacgcaattaatgtgagttagctcactcattaggcaccccaggctttacactttatgcttccggctcgtatgttgtgtggaattgtgagcggataacaatttcacacaggaaacagctatgaccatgattacgaattcgagctcggtacccggggatcctctagaagtatactaataacttcgtatagtataccttatacgaagttataaactagtat

SEQ ID NO: 226 - DNA, 1647 bp, artificial sequence
  PCR product
aacccgcgcagaagacatccaccaaacggtgttacacaatcaccttgtgtgaagttcttgcggaaaactactcgttggcattttttcttgaattccctgtttcgacaaaatgcatgagaaaaaaatcactggatataccaccgttgatatatcccaatggcatcgtaaagaacattttgaggcatttcagtcagttgctcaatgtacctataaccagaccgttcagctggatattacggcctttttaaagaccgtaaagaaaaataagcacaagttttatccggcctttattcacattcttgcccgcctgatgaatgctcatccggaattccgtatggcaatgaaagacggtgagctggtgatatgggatagtgttcacccttgttacaccgttttccatgagcaaactgaaacgttttcatcgctctggagtgaataccacgacgatttccggcagtttctacacatatattcgcaagatgtggcgtgttacggtgaaaacctggcctatttccctaaagggtttattgagaatatgtttttcgtctcagccaatccctgggtgagtttcaccagttttgatttaaacgtggccaatatggacaacttcttcgcccccgttttcaccatgggcaaatattatacgcaaggcgacaaggtgctgatgccgctggcgattcaggttcatcatgccgtctgtgatggcttccatgtcggcagaatgcttaatgaattacaacagtactgcgatgagtggcagggcggggctcctaggatggtgagcaagggcgaggagctgttcaccggggtggtgcccatcctggtcgagctggacggcgacgtaaacggccacaagttcagcgtgtccggcgagggcgagggcgatgccacctacggcaagctgaccctgaagttcatctgcaccaccggcaagctgcccgtgccctggcccaccctcgtgaccaccctgacctacggcgtgcagtgcttcagccgctaccccgaccacatgaagcagcacgacttcttcaagtccgccatgcccgaaggctacgtccaggagcgcaccatcttcttcaaggacgacggcaactacaagacccgcgccgaggtgaagttcgagggcgacaccctggtgaaccgcatcgagctgaagggcatcgacttcaaggaggacggcaacatcctggggcacaagctggagtacaactacaacagccacaacgtctatatcatggccgacaagcagaagaacggcatcaaggtgaacttcaagatccgccacaacatcgaggacggcagcgtgcagctcgccgaccactaccagcagaacacccccatcggcgacggccccgtgctgctgcccgacaaccactacctgagcacccagtccgccctgagcaaagaccccaacgagaagcgcgatcacatggtcctgctggagttcgtgaccgccgccgggatcactctcggcatggacgagctgtacaagtactcagatctcgagctcgctaggaatgcattagaggtccacacgaaccaggacccgctcgattaagcggccgcttccatggttttaattaatcaccgttgtgctcacttctcaaatcgacaaaggaaacacacttcgtgcagcatgtgccccat

SEQ ID NO: 227 - DNA, 2600 bp, artificial sequence
  PCR product
agaggttgacaccgacaaagcaggttctcatagaatgaagaggccgcacctcctagtggcagaagcgttcttttcgtaggcacttcggcagagatgtctcacgtttgatgggttcttatttcatacatggttgggcggtttaggctttcagactcgagaaccatcagaattcaaactttgcacgcggcaaaacgcgggggtaaccatgtcgtgtgtcggtggtaattagtgaggcagtcttgctttagttggcagtgtgtcctcatgttttccctcgctgtctgcgtaaaggcacacaatctactttgttttacctgaactcggttcacaaacctaacgttctcggtacaaacccatctgtgtatccgcgtgtgagccgatcgcttcgttgcagaacttctttctaggccaaggccactattgccagcggcacaaatcgaaatattctcaatccttggcttagtgtggagactttttacttcgtgttactattgtttctcgagtcaaactctgcatcttgtctttgcgctgatctccgctctcagagactcgctgaagcttataaactagtatcgataagcttgaacacgcgtctcagggtgcgtggttagaacacgcgtctcagggtgcgtggttagaacacgcgtctcagggtgcgtggttggaacacgcgtgtcagggtgcgtggttggaacacgcgtctcaaggtttgtggttaagcttgcctgcattgggtgcggttggtgatcctggttggaccggtggagatgcgcgcgcacgaaggggatgtgtcagaaacattttgtttgttctctgtgaacttttagatgtgttaaaggcggcgaatattagcagagagtcctccttgttggattctctcttgaatttcgccctttccttctctttgcgagtctcgtagagaacaagcactcgttcgccgtccctgacgacgcaacccgcgcagaagacatccaccaaacggtgttacacaatcaccttgtgtgaagttcttgcggaaaactactcgttggcattttttcttgaattccctgtttcgacaaaatgcatgagaaaaaaatcactggatataccaccgttgatatatcccaatggcatcgtaaagaacattttgaggcatttcagtcagttgctcaatgtacctataaccagaccgttcagctggatattacggcctttttaaagaccgtaaagaaaaataagcacaagttttatccggcctttattcacattcttgcccgcctgatgaatgctcatccggaattccgtatggcaatgaaagacggtgagctggtgatatgggatagtgttcacccttgttacaccgttttccatgagcaaactgaaacgttttcatcgctctggagtgaataccacgacgatttccggcagtttctacacatatattcgcaagatgtggcgtgttacggtgaaaacctggcctatttccctaaagggtttattgagaatatgtttttcgtctcagccaatccctgggtgagtttcaccagttttgatttaaacgtggccaatatggacaacttcttcgcccccgttttcaccatgggcaaatattatacgcaaggcgacaaggtgctgatgccgctggcgattcaggttcatcatgccgtctgtgatggcttccatgtcggcagaatgcttaatgaattacaacagtactgcgatgagtggcagggcggggctcctaggatggtgagcaagggcgaggagctgttcaccggggtggtgcccatcctggtcgagctggacggcgacgtaaacggccacaagttcagcgtgtccggcgagggcgagggcgatgccacctacggcaagctgaccctgaagttcatctgcaccaccggcaagctgcccgtgccctggcccaccctcgtgaccaccctgacctacggcgtgcagtgcttcagccgctaccccgaccacatgaagcagcacgacttcttcaagtccgccatgcccgaaggctacgtccaggagcgcaccatcttcttcaaggacgacggcaactacaagacccgcgccgaggtgaagttcgagggcgacaccctggtgaaccgcatcgagctgaagggcatcgacttcaaggaggacggcaacatcctggggcacaagctggagtacaactacaacagccacaacgtctatatcatggccgacaagcagaagaacggcatcaaggtgaacttcaagatccgccacaacatcgaggacggcagcgtgcagctcgccgaccactaccagcagaacacccccatcggcgacggccccgtgctgctgcccgacaaccactacctgagcacccagtccgccctgagcaaagaccccaacgagaagcgcgatcacatggtcctgctggagttcgtgaccgccgccgggatcactctcggcatggacgagctgtacaagtactcagatctcgagctcgctaggaatgcattagaggtccacacgaaccaggacccgctcgattaagcggccgcttccatggttttaattaatcaccgttgtgctcacttctcaaatcgacaaaggaaacacacttcgtgcagcatgtgccccat

SEQ ID NO: 228 - DNA, 2294 bp, artificial sequence
  PCR product
cccgtctagcaagacctcaaatgcgctaaaaaagctcaacaagggtagccatgtacaaactctgcagttatttattgccttctaccagaagtcccatgttgcagatctctccaaaaatgtgatcgcggcatctcgtatcaaataacttttacatagagatgttgttgtaccaccaagcttgagcttgacccggctatagaatttacctgcatcgatgaagcttataacttcgtatagtataccttatacgaagttataaactagtatcgataagcttgaacacgcgtctcagggtgcgtggttagaacacgcgtctcagggtgcgtggttagaacacgcgtctcagggtgcgtggttggaacacgcgtgtcagggtgcgtggttggaacacgcgtctcaaggtttgtggttaagcttgcctgcattgggtgcggttggtgatcctggttggaccggtggagatgcgcgcgcacgaaggggatgtgtcagaaacattttgtttgttctctgtgaacttttagatgtgttaaaggcggcgaatattagcagagagtcctccttgttggattctctcttgaatttcgccctttccttctctttgcgagtctcgtagagaacaagcactcgttcgccgtccctgacgacgcaacccgcgcagaagacatccaccaaacggtgttacacaatcaccttgtgtgaagttcttgcggaaaactactcgttggcattttttcttgaattccctgtttcgacaaaatgcatgagaaaaaaatcactggatataccaccgttgatatatcccaatggcatcgtaaagaacattttgaggcatttcagtcagttgctcaatgtacctataaccagaccgttcagctggatattacggcctttttaaagaccgtaaagaaaaataagcacaagttttatccggcctttattcacattcttgcccgcctgatgaatgctcatccggaattccgtatggcaatgaaagacggtgagctggtgatatgggatagtgttcacccttgttacaccgttttccatgagcaaactgaaacgttttcatcgctctggagtgaataccacgacgatttccggcagtttctacacatatattcgcaagatgtggcgtgttacggtgaaaacctggcctatttccctaaagggtttattgagaatatgtttttcgtctcagccaatccctgggtgagtttcaccagttttgatttaaacgtggccaatatggacaacttcttcgcccccgttttcaccatgggcaaatattatacgcaaggcgacaaggtgctgatgccgctggcgattcaggttcatcatgccgtctgtgatggcttccatgtcggcagaatgcttaatgaattacaacagtactgcgatgagtggcagggcggggctcctaggatggtgagcaagggcgaggagctgttcaccggggtggtgcccatcctggtcgagctggacggcgacgtaaacggccacaagttcagcgtgtccggcgagggcgagggcgatgccacctacggcaagctgaccctgaagttcatctgcaccaccggcaagctgcccgtgccctggcccaccctcgtgaccaccctgacctacggcgtgcagtgcttcagccgctaccccgaccacatgaagcagcacgacttcttcaagtccgccatgcccgaaggctacgtccaggagcgcaccatcttcttcaaggacgacggcaactacaagacccgcgccgaggtgaagttcgagggcgacaccctggtgaaccgcatcgagctgaagggcatcgacttcaaggaggacggcaacatcctggggcacaagctggagtacaactacaacagccacaacgtctatatcatggccgacaagcagaagaacggcatcaaggtgaacttcaagatccgccacaacatcgaggacggcagcgtgcagctcgccgaccactaccagcagaacacccccatcggcgacggccccgtgctgctgcccgacaaccactacctgagcacccagtccgccctgagcaaagaccccaacgagaagcgcgatcacatggtcctgctggagttcgtgaccgccgccgggatcactctcggcatggacgagctgtacaagtactcagatctcgagctcgctaggaatgcattagaggtccacacgaaccaggacccgctcgattaagcggccgcttccatggttttaattaatcaccgttgtgctcacttctcaaatcgacaaaggaaacacacttcgtgcagcatgtgccccat

SEQ ID NO: 229 - DNA, 4722 bp, artificial sequence
  selectable marker
aagcttcgccaggctgtaaatcccgtgagtcgtcctcacaaatcatcaagcaggtgtcctcagggagactgcctgactgagttatgctaattcctttctactttggcgtggtcacgtgtaaccatatccgaatcatttctctagccctacgaacaggtaagagcgctagggatgtccgtggagtagtgtgcttactcgataatattcagttgggactaccagcgaggcgctcgctttgctcacgcaatgcctgagacagttgcagaatgaatggtaaccgacaaacgcgttcatatgcgttttcaaacttagtagacgcgtactgtctgaaactggcggtcacaggcaccagataacgcccttggcatcggcatgtctcgtacagaggtccgtatgtagtgccacgacttctaaatccggcgacaggctggtcttttgtcttaccacgtattagcccgcgtgcgatttctcggagcgcacctgttcaacactagaaaacggagtttcctgatcgagaagccaccacctttccagaagttgaacgctagcatgtcattcgattttcaccccccgcgtagttcctgtgtgtcattcgttgtcgagacaactctgtcccgccccggtgctgttccatatgcgtgactttcccgcaattttttcagactttcaggaaagacaggctccggaacgatctcgtccatgactggtaaatccacgacaccgcaatggcccccagcacctctatctctcgtgccaggggactaacgttgtatgcgtctgcgtcttgtctttttgcattcgctttccaaaaaagagagccatccgttcccccgcacattcaacgccgcgagtgcggtttttgtcttttttgagtggtaggacgcttttcatgcgcgaactacgtggacattaagttccattctctttttcgacagcacgaaaccttgcattcaaacccgcccgcggaagatccgatcttgctgctgttcgcagtcccagtagcgtcctgtcggccgcgccgtctctgttggtgggcagccgctacacctgttatctgactgccgtgcgcgaaaatgacgccatttttgggaaaatcggggaacttcattctttaaaagtatgcggaggtttcctttttcttctgttcgtttctttttctcgggtttgataaccgtgttcgatgtaagcactttccgtctctcctccgtgctttgttcgacatcgagaccaggtgtgcagatccttcgcttgtcgatccggagacgcgtgtctcgtagaaccttttcattttaccacacggcagtgcggagcactgctctgagtgcagcagggacgggtgaagtttcgctttagtagtgcgtttctgctctacggggcgttgtcgtgtctgggaagatgcagaaaccggtgtgtctggtcgtcgcgatgacccccaagaggggcatcggcatcaacaacggcctcccgtggccccacttgaccacagatttcaaacactttcgtcgtgtgacaaaaacgacgcccgaagaagccagtcgcctgaacgggtggcttcccaggaaatttgcaaagacgggcgactctggacttccctctccatcagtcggcaagagattcaacgccgttgtcatgggacggaaaaactgggaaagcatgcctcgaaagtttagacccctcgtggacagattgaacatcgtcgtttcctcttccctcaaagaagaagacattgcggcggagaagcctcaagctgaaggccagcagcgcgtccgagtctgtgcttcactcccagcagctctcagccttctggaggaagagtacaaggattctgtcgaccagatttttgtcgtgggaggagcgggactgtacgaggcagcgctgtctctgggcgttgcctctcacctgtacatcacgcgtgtagcccgcgagtttccgtgcgacgttttcttccctgcgttccccggagatgacattctttcaaacaaatcaactgctgcgcaggctgcagctcctgccgagtctgtgttcgttcccttttgtccggagctcggaagagagaaggacaatgaagcgacgtatcgacccatcttcatttccaagaccttctcagacaacggggtaccctacgactccgtggttctcgagaagagaaggaagactgacgacgcagccactgcggaaccgagcaacgcaatgagctccttgacgtccacgagggagacaactcccgtgcacgggttgcaggctccttcttcggccgcagccattgccccggtgttggcgtggatggacgaagaagaccggaaaaaacgcgagcaaaaggaactgattcgggccgttccgcatgttcactttagaggccatgaagaattccagtaccttgatctcattgccgacattattaacaatggaaggacaatggatgaccgaacgggcgttggtgtcatctccaaattcggctgcactatgcgctactcgctggatcaggcctttccacttctcaccacaaagcgtgtgttctggaaaggggtcctcgaagagttgctgtggttcattcgcggcgacacgaacgcaaaccatctttctgagaagggcgtgaagatctgggacaagaatgtgacacgcgagttcctcgattcgcgcaatctcccccaccgagaggtcggagacatcggcccgggctacggcttccagtggagacacttcggcgcggcatacaaagacatgcacacagactacacagggcagggcgtcgaccagctgaagaatgtgatccagatgctgagaacgaatccaacagatcgtcgcatgctcatgactgcctggaatcctgcagcgctggacgaaatggcgctgccgccttgtcacttgttgtgccagttctacgtgaacgaccagaaggagctgtcgtgcatcatgtatcagcggtcgtgcgatgtcggcctcggcgtccccttcaacatcgcttcctattcgcttttgacgctcatggttgcacacgtctgcaacctaaaacctaaggagttcattcacttcatggggaacacgcatgtctacacgaaccatgtcgaggctttaaaagagcagctgcggagagaaccgagaccgttccccattgtgaacatcctcaacaaggaacgcatcaaggaaatcgacgatttcaccgccgaggattttgaggtcgtgggctacgtcccgcacggacgaatccagatggagatggctgtcgaggtccatactaaccaggatccacttgacatggcttcgtacccctgccatcaacacgcgtctgcgttcgaccaggctgcgcgttctcgcggccataacaaccgacgtacggcgttgcgccctcgccggcaacaaaaagccacggaagtccgcctggagcagaaaatgcccacgctactgcgggtttatatagacggtccccacgggatggggaaaaccaccaccacgcaactgctggtggccctgggttcgcgcgacgatatcgtctacgtacccgagccgatgacttactggcgggtgttgggggcttccgagacaatcgcgaacatctacaccacacaacaccgcctcgaccagggtgagatatcggccggggacgcggcggtggtaatgacaagcgcccagataacaatgggcatgccttatgccgtgaccgacgccgttctggctcctcatatcgggggggaggctgggagctcacatgccccgcccccggccctcaccctcatcttcgaccgccatcccatcgccgccctcctgtgctacccggccgcgcgataccttatgggcagcatgaccccccaggccgtgctggcgttcgtggccctcatcccgccgaccttgcccggcacaaacatcgtgttgggggcccttccggaggacagacacatcgaccgcctggccaaacgccagcgccccggcgagcggcttgacctggctatgctggccgcgattcgccgcgtttatgggctgcttgccaatacggtgcggtatctgcagggcggcgggtcgtggcgggaggattggggacagctttcgggggcggccgtgccgccccagggtgccgagccccagagcaacgcgggcccacgaccccatatcggggacacgttatttaccctgtttcgggcccccgagttgctggcccccaacggcgacctgtataacgtgtttgcctgggctttggacgtcttggccaaacgcctccgtcccatgcatgtctttatcctggattacgaccaatcgcccgccggctgccgggacgccctgctgcaacttacctccgggatggtccagacccacgtcaccaccccaggctccataccgacgatctgcgacctggcgcgcacgtttgcccgggagatgggggaggctaactaacggaaatacagaagctgcccgtctctcgttttcctctcttttcggagggatcagggagagtgcctcgggtcggagagagctgacgagggggtgccagagacccctgtgtcctttatcgaagaaaagggatgactcttcatgtggcatttcacacagtctcacctcgccttgttttctttttgtcaatcagaacgaaagcgagttgcgggtgacgcagatgtgcgtgtatccactcgtgaatgcgttatcgttctgtatgccgctagagtgctggactgttgctgtctgcccacgacagcagacaactttccttctatgcacttgcaggattctaga

SEQ ID NO: 230 - DNA, 369 bp, Toxoplasma gondii
gttggtgggcagccgctacacctgttatctgactgccgtgcgcgaaaatgacgccatttttgggaaaatcggggaacttcattctttaaaagtatgcggaggtttcctttttcttctgttcgtttctttttctcgggtttgataaccgtgttcgatgtaagcactttccgtctctcctccgtgctttgttcgacatcgagaccaggtgtgcagatccttcgcttgtcgatccggagacgcgtgtctcgtagaaccttttcattttaccacacggcagtgcggagcactgctctgagtgcagcagggacgggtgaagtttcgctttagtagtgcgtttctgctctacggggcgttgtcgtgtctgggaag

SEQ ID NO: 231 - DNA, 330 bp, Toxoplasma gondii
cggaaatacagaagctgcccgtctctcgttttcctctcttttcggagggatcagggagagtgcctcgggtcggagagagctgacgagggggtgccagagacccctgtgtcctttatcgaagaaaagggatgactcttcatgtggcatttcacacagtctcacctcgccttgttttctttttgtcaatcagaacgaaagcgagttgcgggtgacgcagatgtgcgtgtatccactcgtgaatgcgttatcgttctgtatgccgctagagtgctggactgttgctgtctgcccacgacagcagacaactttccttctatgcacttgcaggat
